United States Patent Application Publication US 2020/0316221 A1 - sequence listing, part 2

SEQ ID NO: 1669 - DNA, 2217 bp, Artificial Sequence
  Synthetic Polynucleotide
atggctgccgatggttatcttccagattggctcgaggacaacctctctgagggcattcgcgagtggtgggcgctgaaacctggagccccgaagcccaaagccaaccagcaaaagcaggacgacggccggggtctggtgcttcctggctacaagtacctcggacccttcaacggactcgacaagggggagcccgtcaacgcggcggacgcggcggccctcgagcacgacaaggcctacgaccagcagctgcaggcgggtgacaatccgtacctgcggtataaccacgccgacgccgagtttcaggagcgtctgcaagaagatacgtcttttgggggcaacctcgggcgagcagtcttccaggccaagaagcgggttctcgaacctctcggtctggttgaggaaggcgctaagacggctcctggaaagaagagaccggtagagccatcaccccagcgttctccagactcctctacgggcatcggcaagaagggccaacagcccgccagaaaaagactcaattttggtcagactggcgactcagagtcagttccagaccctcaacctctcggagaacctccagcagcgccctctggtgtgggacctaatacaatggctgcaggcggtggcgcaccaatggcagacaataacgaaggcgccgacggagtgggtagttcctcgggaaattggcattgcgattccacatggctgggcgacagagtcatcaccaccagcacccgaacctgggccctgcccacctacaacaaccacctctacaagcaaatctccaacgggacatcgggaggagccaccaacgacaacacctacttcggctacagcaccccctgggggtattttgactttaacagattccactgccacttttcaccacgtgactggcagcgactcatcaacaacaactggggattccggcccaagagactcagcttcaagctcttcaacatccaggtcaaggaggtcacgcagaatgaaggcaccaagaccatcgccaataacctcaccagcaccatccaggtgtttacggactcggagtaccagctgccgtacgttctcggctctgcccaccagggctgcctgcctccgttcccggcggacgtgttcacgattccccagtacggctacctaacactcaacaacggtagtcaggccgtgggacgctcctccttctactgcctggaatactttccttcgcagatgctgggaaccggcaacaacttccagtttacttacaccttcgaggacgtgcctttccacagcagctacgcccacagccagagcttggaccggctgatgaatcctctgattgaccagtacctgtactacttgtctcggattcaaacaacaggaggcacggcaaatacgcagactctgggcttcagccaaggtgggcctaatacaatggccaatcaggcaaagaactggctgccaggaccctgttaccgccaacaacgcgtctcaacgacaaccgggcaaaacaacaatagcaactttgcctggactgctgggaccaaataccatctgaatggaagaaattcattggctaatcctggcatcgctatggcaacacacaaagacgacgaggagcgtttttttcccagtaacgggatcctgatttttggcaaacaaaatgctgccagagacaatgcggattacagcgatgtcatgcccaccagcgaggaagaaatcaaaaccactaaccctgtggccacagaggaatacggtatcgtggcagataacttgcagcagcaaaacacggctcctcaaattggaactgtcaacagccagggggccttacccggtatggtctggcagaaccgggacgtgtacctgcagggtcccatctgggccaagattcctcacacggacggcaacttccacccgtctccgctgatgggcggctttggcctgaaacatcctccgcctcagatcctgatcaagaacacgcctgtacctgcggatcctccgaccaccttcaaccagtcaaagctgaactctttcatcacgcaatacagcaccggacaggtcagcgtggaaattgaatgggagctgcagaaggaaaacagcaagcgctggaaccccgagatccagtacacctccaactactacaaatctacaagtgtggactttgctgttaatacagaaggcgtgtactctgaaccccgccccattggcacccgttacctcacccgtaatctgtaa

SEQ ID NO: 1670 - DNA, 2217 bp, Artificial Sequence
  Synthetic Polynucleotide
atggctgccgatggttatcttccagattggctcgaggacaacctctctgagggcattcgcgagtggtgggcgctgaaacctggagccccgaagcccaaagccaaccagcaaaagcaggacgacggccggggtctggtgcttcctggctacaagtacctcggacccttcaacggactcgacaagggggagcccgtcaacgcggcggacgcggcggccctcgagcacgacaaggcctacgaccagcagctgcaggcgggtgacaatccgcacctgcggtataaccacgccgacgccgagtttcaggagcgtctgcaagaagatacgtcttttgggggcaacctcgggcgagcagtcttccaggccaagaagcgggttctcgaacctctcggtctggttgaggaaggcgctaagacggctcctggaaagaagagaccggtagagccatcaccccagcgttctccagactcctctacgggcatcggcaagaagggccaacagcccgccagaaaaagactcaattttggtcagactggcgactcagagtcagttccagaccctcaacctctcggagaacctccagcagcgccctctggtgtgggacctaatacaatggctgcaggcggtggcgcaccaatggcagacaataacgaaggcgccgacggagtgggtagttcctcgggaaattggcattgcgattccacatggctgggcgacagagtcatcaccaccagcacccgaacctgggccctgcccacctacaacaaccacctctacaagcaaatctccaacgggacatcgggaggagccaccaacgacaacacctacttcggctacagcaccccctgggggtattttgactttaacagattccactgccacttttcaccacgtgactggcagcgactcatcaacaacaactggggattccggcccaagagactcagcttcaagctcttcaacatccaggtcaaggaggtcacgcagaatgaaggcaccaagaccatcgccaataacctcaccagcaccatccaggtgtttacggactcggagtaccagctgccgtacgttctcggctctgcccaccagggctgcctgcctccgttcccggcggacgtgttcacgattccccagtacggctacctaacactcaacaacggtagtcaggccgtgggacgctcctccttctactgcctggaatactttccttcgcagatgctgagaaccggcaacaacttccagtttacttacaccttcgaggacgtgcctttccacagcagctacgcccacagccagagcttggaccggctgatgaatcctctgattgaccagtacctgtactacttgtctcggattcaaacaacaggaggcacggcaaatacgcagactctgggcttcagccaaggtgggcctaatacaatggccaatcaggcaaagaactggctgccaggaccctgttaccgccaacaacgcgtctcaacgacaaccgggcaaaacaacaatagcaactttgcctggactgctgggaccaaataccatctgaatggaagaaattcattggctaatcctggcatcgctatggcaacacacaaagacgacgaggagcgtttttttcccagtaacgggatcctgatttttggcaaacaaaatgctgccagagacaatgcggattacagcgatgtcatgcccaccagcgaggaagaaatcaaaaccactaaccctgtggccacagaggaatacggtatcgtggcagataacttgcagcagcaaaacacggctcctcaaattggaactgtcaacagccagggggccttacccggtatggtctggcagaaccgggacgtgtacctgcagggtcccatctgggccaagattcctcacacggacggcaacttccacccgtctccgctgatgggcggctttggcctgaaacatcctccgcctcagatcctgatcaagaacacgcctgtacctgcggatcctccgaccaccttcaaccagtcaaagctgaactctttcatcacgcaatacagcaccggacaggtcagcgtggaaattgaatgggagctgcagaaggaaaacagcaagcgctggaaccccgagatccagtacacctccaactactacaaatctacaagtgtggactttgctgttaatacagaaggcgtgtactctgaaccccgccccattggcacccgttacctcacccgtaatctgtaa

SEQ ID NO: 1671 - DNA, 2217 bp, Artificial Sequence
  Synthetic Polynucleotide
atggctgccgatggttatcttccagattggctcgaggacaacctctctgagggcattcgcgagtggtgggcgctgaaacctggagccccgaagcccaaagccaaccagcaaaagcaggacgacggccggggtctggtgcttcctggctacaagtacctcggacccttcaacggactcgacaagggggagcccgtcaacgcggcggacgcggcggccctcgagcacgacaaggcctacgaccagcagctgcaggcgggtgacaatccgtacctgcggtataaccacgccgacgccgagtttcaggagcgtctgcaagaagatacgtcttttgggggcaacctcgggcgagcagtcttccaggccaagaagcgggttctcgaacctctcggtctggttgaggaaggcgctaagacggctcctggaaagaagagaccggtagagccatcaccccagcgttctccagactcctctacgggcatcggcaagaagggccaacagcccgccagaaaaagactcaattttggtcagactggcgactcagagtcagttccagaccctcaacctctcggagaacctccagcagcgccctctggtgtgggacctaatacaatggctgcaggcggtggcgcaccaatggcagacaataacgaaggcgccgacggagtgggtagttcctcgggaaattggcattgcgattccacatggctgggcgacagagtcatcaccaccagcacccgaacctgggccctgcccacctacaacaaccacctctacaagcaaatctccaacgggacatcgggaggagccaccaacgacaacacctacttcggctacagcaccccctgggggtattttgactttaacagattccactgccacttttcaccacgtgactggcagcgactcatcaacaacaactggggattccggcccaagagactcagcttcaagctcttcaacatccaggtcaaggaggtcacgcagaatgaaggcaccaagaccatcgccaataacctcaccagcaccatccaggtgtttacggactcggagtaccagctgccgtacgttctcggccctgcccaccagggctgcctgcctccgttcccggcggacgtgttcacgattccccagtacggctacctaacactcaacaacggtagtcaggccgtgggacgctcctccttctactgcctggaatactttccttcgcagatgctgagaaccggcaacaacttccagtttacttacaccttcgaggacgtgcctttccacagcagctacgcccacagccagagcttggaccggctgatgaatcctctgattgaccagtacctgtactacttgtctcggattcaaacaacaggaggcacggcaaatacgcagactctgggcttcagccaaggtgggcctaatacaatggccaatcaggcaaagaactggctgccaggaccctgttaccgccaacaacgcgtctcaacgacaaccgggcaaaacaacaatagcaactttgcctggactgctgggaccaaataccatctgaatggaagaaattcattggctaatcctggcatcgctatggcaacacacaaagacgacgaggagcgtttttttcccagtaacgggatcctgatttttggcaaacaaaatgctgccagagacaatgcggattacagcgatgtcatgcccaccagcgaggaagaaatcaaaaccactaaccctgtggccacagaggaatacggtatcgtggcagataacttgcagcagcaaaacacggctcctcaaattggaactgtcaacagccagggggccttacccggtatggtctggcagaaccgggacgtgtacctgcagggtcccatctgggccaagattcctcacacggacggcaacttccacccgtctccgctgatgggcggctttggcctgaaacatcctccgcctcagatcctgatcaagaacacgcctgtacctgcggatcctccgaccaccttcaaccagtcaaagctgaactctttcatcacgcaatacagcaccggacaggtcagcgtggaaattgaatgggagctgcagaaggaaaacagcaagcgctggaaccccgagatccagtacacctccaactactacaaatctacaagtgtggactttgctgttaatacagaaggcgtgtactctgaaccccgccccattggcacccgttacctcacccgtaatctgtaa

SEQ ID NO: 1672 - DNA, 2217 bp, Artificial Sequence
  Synthetic Polynucleotide
atggctgccgatggttatcttccagattggctcgaggacaacctctctgagggcattcgcgagtggtgggcgctgaaacctggagccccgaagcccaaagccaaccagcaaaagcaggacgacggccggggtctggtgcttcctggctacaagtacctcggacccttcaacggactcgacaagggggagcccgtcaacgcggcggacgcggcggccctcgagcacgacaaggcctacgaccagcagctgcaggcgggtgacaatccgtacctgcggtataaccacgccgacgccgagtttcaggagcgtctgcaagaagatacgtcttttgggggcaacctcgggcgagcagtcttccaggccaagaagcgggttctcgaacctctcggtctggttggggaaggcgctaagacggctcctggaaagaagagaccggtagagccatcaccccagcgttctccagactcctctacgggcatcggcaagaagggccaacagcccgccagaaaaagactcaattttggtcagactggcgactcagagtcagttccagaccctcaacctctcggagaacctccagcagcgccctctggtgtgggacctaatacaatggctgcaggcggtggcgcaccaatggcagacaataacgaaggcgccgacggagtgggtagttcctcgggaaattggcattgcgattccacatggctgggcgacagagtcatcaccaccagcacccgaacctgggccctgcccacctacaacaaccacctctacaagcaaatctccaacgggacatcgggaggagccaccaacgacaacacctacttcggctacagcaccccctgggggtattttgactttaacagattccactgccacttttcaccacgtgactggcagcgactcatcaacaacaactggggattccggcccaagagactcagcttcaagctcttcaacatccaggtcaaggaggtcacgcagaatgaaggcaccaagaccatcgccaataacctcaccagcaccatccaggtgtttacggactcggagtaccagctgccgtacgttctcggctctgcccaccagggctgcctgcctccgttcccggcggacgtgttcacgattccccagtacggctacctaacactcaacaacggtagtcaggccgtgggacgctcctccttctactgcctggaatactttccttcgcagatgctgagaaccggcaacaacttccagtttacttacaccttcgaggacgtgcctttccacagcagctacgcccacagccagagcttggaccggctgatgaatcctctgattgaccagtacctgtactacttgtctcggattcaaacaacaggaggcacggcaaatacgcagactctgggcttcagccaaggtgggcctaatacaatggccaatcaggcaaagaactggctgccaggaccctgttaccgccaacaacgcgtctcaacgacaaccgggcaaaacaacaatagcaactttgcctggactgctgggaccaaataccatctgaatggaagaaattcattggctaatcctggcatcgctatggcaacacacaaagacgacgaggagcgtttttttcccagtaacgggatcctgatttttggcaaacaaaatgctgccagagacaatgcggattacagcgatgtcatgcccaccagcgaggaagaaatcaaaaccactaaccctgtggccacagaggaatacggtatcgtggcagataacttgcagcagcaaaacacggctcctcaaattggaactgtcaacagccagggggccttacccggtatggtctggcagaaccgggacgtgtacctgcagggtcccatctgggccaagattcctcacacggacggcaacttccacccgtctccgctgatgggcggctttggcctgaaacatcctccgcctcagatcctgatcaagaacacgcctgtacctgcggatcctccgaccaccttcaaccagtcaaagctgaactctttcatcacgcaatacagcaccggacaggtcagcgtggaaattgaatgggagctgcagaaggaaaacagcaagcgctggaaccccgagatccagtacacctccaactactacaaatctacaagtgtggactttgctgttaatacagaaggcgtgtactctgaaccccgccccattggcacccgttacctcacccgtaatctgtaa

SEQ ID NO: 1673 - DNA, 2217 bp, Artificial Sequence
  Synthetic Polynucleotide
atggctgccgatggttatcttccagattggctcgaggacaacctctctgagggcattcgcgagtggtgggcgctgaaacctggagccccgaagcccaaagccaaccagcaaaagcaggacgacggccggggtctggtgcttcctggctacaagtacctcggacccttcaacggactcgacaagggggagcccgtcaacgcggcggacgcggcggccctcgagcacgacaaggcctacgaccagcagctgcaggcgggtgacaatccgtacctgcggtataaccacgccgacgccgagtttcaggagcgtctgcaagaagatacgtcttttgggggcaacctcgggcgagcagtcttccaggccaagaagcgggttctcgaacctctcggtctggttgaggaaggcgctaagacggctcctggaaagaagagaccggtagagccatcaccccagcgttctccagactcctctacgggcatcggcaagaagggccaacagcccgccagaaaaagactcaattttggtcagactggcgactcagagtcagttccagaccctcaacctctcggagaacctccagcagcgccctctggtgtgggacctaatacaatggctgcaggcggtggcgcaccaatggcagacaataacgaaggcgccgacggagtgggtagttcctcgggaaattggcattgcgattccacatggctgggcgacagagtcatcaccaccagcacccgaacctgggccctgcccacctacaacaaccacctctacaagcaaatctccaacgggacatcgggaggagccaccaacgacaacacctacttcggctacagcaccccctgggggtattttgactttaacagattccactgccacttttcaccacgtgactggcagcgactcatcaacaacaactggggattccggcccaagagactcagcttcaagctcttcaacatccaggtcaaggaggtcacgcagaatgaaggcaccaagaccatcgccaataacctcaccagcaccatccaggtgtttacggactcggagtaccagctgccgtacgttctcggctctgcccaccagggctgcctgcctccgttcccggcggacgtgttcacgattccccagtacggctacctaacactcaacaacggtagtcaggccgtgggacgctcctccttctactgcctggaatactttccttcgcagatgctgagaaccggcaacaacttccagtttacttacaccttcgaggacgtgcctttccacagcagctacgcccacagccagagcttggaccggctgatgaatcctctgattgaccagtacctgtactacttgtctcggattcaaacaacaggaggcacggcaaatacgcagactctgggcttcagccaaggtgggcctaatacaatggccaatcaggcaaagaactggctgccaggaccctgttaccgccaacaacgcgtctcaacgacaaccgggcaaaacaacaatagcaactttgcctggactgctgggaccaaataccatctgaatggaagaaattcattggctaatcctggcatcgctatggcaacacacaaagacgacgaggagcgtttttttcccagtaacgggatcctgatttttggcaaacaaaatgctgccagagacaatgcggattacagcgatgtcatgcccaccagcgaggaagaaatcaaaaccactaaccctgtggccacagaggaatacggtatcgtggcagataacttgcagcagcaaaacacggctcctcaaattggaactgtcaacagccagggggccttacccggtatggtctggcagaaccgggacgtgtacctgcagggtcccatctgggccaagattcctcacacggacggcaacttccacccgtctccgctgatgggcggctttggcctgaaacatcctccgcctcagatcctgatcaagaacacgcctgtacctgcggatcctccgaccaccttcaaccagtcaaagctgaactctttcatcacgcaatacagcaccggacaggtcagcgtggaaattgaatgggagctgcagaaggaaagcagcaagcgctggaaccccgagatccagtacacctccaactactacaaatctacaagtgtggactttgctgttaatacagaaggcgtgtactctgaaccccgccccattggcacccgttacctcacccgtaatctgtaa

SEQ ID NO: 1674 - DNA, 2217 bp, Artificial Sequence
  Synthetic Polynucleotide
atggctgccgatggttatcttccagattggctcgaggacaacctctctgagggcattcgcgagtggtgggcgctgaaacctggagccccgaagcccaaagccaaccagcaaaagcaggacgacggccggggtctggtgcttcctggctacaagtacctcggacccttcaacggactcgacaagggggagcccgtcaacgcggcggacgcggcggccctcgagcacgacaaggcctacgaccagcagctgcaggcgggtgacaatccgtacctgcggtataaccacgccgacgccgagtttcaggagcgtctgcaagaagatacgtcttttgggggcaacctcgggcgagcagtcttccaggccaagaagcgggttctcgaacctctcggtctggttgaggaaggcgctaagacggctcctggaaagaagagaccggtagagccatcaccccagcgttctccagactcctctacgggcatcggcaagaagggccaacagcccgccagaaaaagactcaattttggtcagactggcgactcagagtcagttccagaccctcaacctctcggagaacctccagcagcgccctctggtgtgggacctaatacaatggctgcaggcggtggcgcaccaatggcagacaataacgaaggcgccgacggagtgggtagttcctcgggaaattggcattgcgattccacatggctgggcgacagagtcatcaccaccagcacccgaacctgggccctgcccacctacaacaaccacctctacaagcaaatctccaacgggacatcgggaggagccaccaacgacaacacctacttcggctacagcaccccctgggggtattttgactttaacagattccactgccacttttcaccacgtgactggcagcgactcatcaacaacaactggggattccggcccaagagactcagcttcaagctcttcaacatccaggtcaaggaggtcacgcagaatgaaggcaccaagaccatcgccaataacctcaccagcaccatccaggtgtttacggactcggagtaccagctgccgtacgttctcggctctgcccaccagggctgcctgcctccgttcccggcggacgtgttcacgattccccagtacggctacctaacactcaacaacggtagtcaggccgtgggacgctcctccttctactgcctggaatactttccttcgcagatgctgagaaccggcaacaacttccagtttacttacaccttcgaggacgtgcctttccacagcagctacgcccacagccagagcttggaccggctgatgaatcctctgattgaccagtacctgtactacttgtctcggattcaaacaacaggaggcacggcaaatacgcagactctgggcttcagccaaggtgggcctaatacaatggccaatcaggcaaagaactggctgccaggaccctgttaccgccaacaacgcgtctcaacgacaaccgggcaaaacaacaatagcaactttgcctggactgctgggaccaaataccatctgaatggaagaaattcattggctaatcctggcatcgctatggcaacacacaaagacgacgaggagcgtttttttcccagtaacgggatcctgatttttggcaaacaaaatgctgccagagacaatgcggattacagcgatgtcatgcccgccagcgaggaagaaatcaaaaccactaaccctgtggccacagaggaatacggtatcgtggcagataacttgcagcagcaaaacacggctcctcaaattggaactgtcaacagccagggggccttacccggtatggtctggcagaaccgggacgtgtacctgcagggtcccatctgggccaagattcctcacacggacggcaacttccacccgtctccgctgatgggcggctttggcctgaaacatcctccgcctcagatcctgatcaagaacacgcctgtacctgcggatcctccgaccaccttcaaccagtcaaagctgaactctttcatcacgcaatacagcaccggacaggtcagcgtggaaattgaatgggagctgcagaaggaaaacagcaagcgctggaaccccgagatccagtacacctccaactactacaaatctacaagtgtggactttgctgttaatacagaaggcgtgtactctgaaccccgccccattggcacccgttacctcacccgtaatctgtaa

SEQ ID NO: 1675 - DNA, 2217 bp, Artificial Sequence
  Synthetic Polynucleotide
atggctgccgatggttatcttccagattggctcgaggacaacctctctgagggcattcgcgagtggtgggcgctgaaacctggagccccgaagcccaaagccaaccagcaaaagcaggacgacggccggggtctggtgcttcctggctacaagtacctcggacccttcaacggactcgacaagggggagcccgtcaacgcggcggacgcggcggccctcgagcacgacaaggcctacgaccagcagctgcaggcgggtgacaatccgtacctgcggtataaccacgccgacgccgagtttcaggagcgtctgcaagaagatacgtcttttgggggcaacctcgggcgagcagtcttccaggccaagaagcgggttctcgaacctctcggtctggttgaggaaggcgctaagacggctcctggaaagaagagaccggtagagccatcaccccagcgttctccagactcctctacgggcatcggcaagaagggccaacagcccgccagaaaaagactcaattttggtcagactggcgactcagagtcagttccagaccctcaacctctcggagaacctccagcagcgccctctggtgtgggacctaatacaatggctgcaggcggtggcgcaccaatggcagacaataacgaaggcgccgacggagtgggtagttcctcgggaaattggcattgcgattccacatggctgggcgacagagtcatcaccaccagcacccgaacctgggccctgcccacctacaacaaccacctctacaagcaaatctccaacgggacatcgggaggagccaccaacgacaacacctacttcggctacagcaccccctgggggtattttgactttaacagattccactgccacttttcaccacgtgactggcagcgactcatcaacaacaactggggattccggcccaagagactcagcttcaagctcttcaacatccaggtcaaggaggtcacgcagaatgaaggcaccaagaccatcgccaataacctcaccagcaccatccaggtgtttacggactcggagtaccagctgccgtacgttctcggctctgcccaccagggctgcctgcctccgttcccggcggacgtgctcacgattccccagtacggctacctaacactcaacaacggtagtcaggccgtgggacgctcctccttctactgcctggaatactttccttcgcagatgctgagaaccggcaacaacttccagtttacttacaccttcgaggacgtgcctttccacagcagctacgcccacagccagagcttggaccggctgatgaatcctctgattgaccagtacctgtactacttgtctcggattcaaacaacaggaggcacggcaaatacgcagactctgggcttcagccaaggtgggcctaatacaatggccaatcaggcaaagaactggctgccaggaccctgttaccgccaacaacgcgtctcaacgacaaccgggcaaaacaacaatagcaactttgcctggactgctgggaccaaataccatctgaatggaagaaattcattggctaatcctggcatcgctatggcaacacacaaagacgacgaggagcgtttttttcccagtaacgggatcctgatttttggcaaacaaaatgctgccagagacaatgcggattacagcgatgtcatgcccaccagcgaggaagaaatcaaaaccactaaccctgtggccacagaggaatacggtatcgtggcagataacttgcagcagcaaaacacggctcctcaaattggaactgtcaacagccagggggccttacccggtatggtctggcagaaccgggacgtgtacctgcagggtcccatctgggccaagattcctcacacggacggcaacttccacccgtctccgctgatgggcggctttggcctgaaacatcctccgcctcagatcctgatcaagaacacgcctgtacctgcggatcctccgaccaccttcaaccagtcaaagctgaactctttcatcacgcaatacagcaccggacaggtcagcgtggaaattgaatgggagctgcagaaggaaaacagcaagcgctggaaccccgagatccagtacacctccaactactacaaatctacaagtgtggactttgctgttaatacagaaggcgtgtactctgaaccccgccccattggcacccgttacctcacccgtaatctgtaa

SEQ ID NO: 1676 - DNA, 2217 bp, Artificial Sequence
  Synthetic Polynucleotide
atggctgccgatggttatcttccagattggctcgaggacaacctctctgagggcattcgcgagtggtgggcgctgaaacctggagccccgaagcccaaagccaaccagcaaaagcaggacgacggccggggtctggtgcttcctggctacaagtacctcggacccttcaacggactcgacaagggggagcccgtcaacgcggcggacgcggcggccctcgagcacgacaaggcctacgaccagcagctgcaggcgggtgacaatccgtacctgcggtataaccacgccgacgccgagtttcaggagcgtctgcaagaagatacgtcttttgggggcaacctcgggcgagcagtcttccaggccaagaagcgggttctcgaacctctcggtctggttgaggaaggcgctaagacggctcctggaaagaagagaccggtagagccatcaccccagcgttctccagactcctctacgggcatcggcaagaagggccaacagcccgccagaaaaagactcaattttggtcagactggcgactcagagtcagttccagaccctcaacctctcggagaacctccagcagcgccctctggtgtgggacctaatacaatggctgcaggcggtggcgcaccaatggcagacaataacgaaggcgccgacggagtgggtagttcctcgggaaattggcattgcgattccacatggctgggcgacagagtcatcaccaccagcacccgaacctgggccctgcccacctacaacaaccacctctacaagcaaatctccaacgggacatcgggaggagccaccaacgacaacacctacttcggctacagcaccccctgggggtattttgactttaacagattccactgccacttttcaccacgtgactggcagcgactcatcaacaacaactggggattccggcccaagagactcagcttcaagctcttcaacatccaggtcaaggaggtcacgcagaatgaaggcaccaagaccatcgccaataacctcaccagcaccatccgggtgtttacggactcggagtaccagctgccgtacgttctcggctctgcccaccagggctgcctgcctccgttcccggcggacgtgttcacgattccccagtacggctacctaacactcaacaacggtagtcaggccgtgggacgctcctccttctactgcctggaatactttccttcgcagatgctgagaaccggcaacaacttccagtttacttacaccttcgaggacgtgcctttccacagcagctacgcccacagccagagcttggaccggctgatgaatcctctgattgaccagtacctgtactacttgtctcggattcaaacaacaggaggcacggcaaatacgcagactctgggcttcagccaaggtgggcctaatacaatggccaatcaggcaaagaactggctgccaggaccctgttaccgccaacaacgcgtctcaacgacaaccgggcaaaacaacaatagcaactttgcctggactgctgggaccaaataccatctgaatggaagaaattcattggctaatcctggcatcgctatggcaacacacaaagacgacgaggagcgtttttttcccagtaacgggatcctgatttttggcaaacaaaatgctgccagagacaatgcggattacagcgatgtcatgcccaccagcgaggaagaaatcaaaaccactaaccctgtggccacagaggaatacggtatcgtggcagataacttgcagcagcaaaacacggctcctcaaattggaactgtcaacagccagggggccttacccggtatggtctggcagaaccgggacgtgtacctgcagggtcccatctgggccaagattcctcacacggacggcaacttccacccgtctccgctgatgggcggctttggcctgaaacatcctccgcctcagatcctgatcaagaacacgcctgtacctgcggatcctccgaccaccttcaaccagtcaaagctgaactctttcatcacgcaatacagcaccggacaggtcagcgtggaaattgaatgggagctgcagaaggaaaacagcaagcgctggaaccccgagatccagtacacctccaactactacaaatctacaagtgtggactttgctgttaatacagaaggcgtgtactctgaaccccgccccattggcacccgttacctcacccgtaatctgtaa

SEQ ID NO: 1677 - DNA, 2217 bp, Artificial Sequence
  Synthetic Polynucleotide
atggctgccgatggttatcttccagattggctcgaggacaacctctctgagggcattcgcgagtggtgggcgctgaaacctggagccccgaagcccaaagccaaccagcaaaagcaggacgacggccggggtctggtgcttcctggctacaagtacctcggacccttcaacggactcgacaagggggagcccgtcaacgcggcggacgcggcggccctcgagcacgacaaggcctacgaccagcagctgcaggcgggtgacaatccgtacctgcggtataaccacgccgacgccgagtttcaggagcgtctgcaagaagatacgtcttttgggggcaacctcgggcgagcagtcttccaggccaagaagcgggttctcgaacctctcggtctggttgaggaaggcgctaagacggctcctggaaagaagagaccggtagagccatcaccccagcgttctccagactcctctacgggcatcggcaagaagggccaacagcccgccagaaaaagactcaattttggtcagactggcgactcagagtcagttccagaccctcaacctctcggagaacctccagcagcgccctctggtgtgggacctaatacaatggctgcaggcggtggcgcaccaatggcagacaataacgaaggcgccgacggagtgggtagttcctcgggaaattggcattgcgattccacatggctgggcgacagagtcatcaccaccagcacccgaacctgggccctgcccacctacaacaaccacctctacaagcaaatctccaacgggacatcgggaggagccaccaacgacaacacctacttcggctacagcaccccctgggggtattttgactttaacagattccactgccacttttcaccacgtgactggcggcgactcatcaacaacaactggggattccggcccaagagactcagcttcaagctcttcaacatccaggtcaaggaggtcacgcagaatgaaggcaccaagaccatcgccaataacctcaccagcaccatccaggtgtttacggactcggagtaccagctgccgtacgttctcggctctgcccaccagggctgcctgcctccgttcccggcggacgtgttcacgattccccagtacggctacctaacactcaacaacggtagtcaggccgtgggacgctcctccttctactgcctggaatactttccttcgcagatgctgagaaccggcaacaacttccagtttacttacaccttcgaggacgtgcctttccacagcagctacgcccacagccagagcttggaccggctgatgaatcctctgattgaccagtacctgtactacttgtctcggattcaaacaacaggaggcacggcaaatacgcagactctgggcttcagccaaggtgggcctaatacaatggccaatcaggcaaagaactggctgccaggaccctgttaccgccaacaacgcgtctcaacgacaaccgggcaaaacaacaatagcaactttgcctggactgctgggaccaaataccatctgaatggaagaaattcattggctaatcctggcatcgctatggcaacacacaaagacgacgaggagcgtttttttcccagtaacgggatcctgatttttggcaaacaaaatgctgccagagacaatgcggattacagcgatgtcatgcccaccagcgaggaagaaatcaaaaccactaaccctgtggccacagaggaatacggtatcgtggcagataacttgcagcagcaaaacacggctcctcaaattggaactgtcaacagccagggggccttacccggtatggtctggcagaaccgggacgtgtacctgcagggtcccatctgggccaagattcctcacacggacggcaacttccacccgtctccgctgatgggcggctttggcctgaaacatcctccgcctcagatcctgatcaagaacacgcctgtacctgcggatcctccgaccaccttcaaccagtcaaagctgaactctttcatcacgcaatacagcaccggacaggtcagcgtggaaattgaatgggagctgcagaaggaaaacagcaagcgctggaaccccgagatccagtacacctccaactactacaaatctacaagtgtggactttgctgttaatacagaaggcgtgtactctgaaccccgccccattggcacccgttacctcacccgtaatctgtaa

SEQ ID NO: 1678 - DNA, 2217 bp, Artificial Sequence
  Synthetic Polynucleotide
atggctgccgatggttatcttccagattggctcgaggacaacctctctgagggcattcgcgagtggtgggcgctgaaacctggagccccgaagcccaaagccaaccagcaaaagcaggacgacggccggggtctggtgcttcctggctacaagtacctcggacccttcaacggactcgacaagggggagcccgtcaacgcggcggacgcagcggccctcgagcacgacaaggcctacgaccagcagctgcaggcgggtgacaatccgtacctgcggtataaccacgccgacgccgagtttcaggagcgtctgcaagaagatacgtcttttgggggcaacctcgggcgagcagtcttccaggccaagaagcgggttctcgaacctctcggtctggttgaggaaggcgctaagacggctcctggaaagaagagaccggtagagccatcaccccagcgttctccagactcctctacgggcatcggcaagaaaggccaacagcccgccagaaaaagactcaattttggtcagactggcgactcagagtcagttccagaccctcaacctctcggagaacctccagcagcgccctctggtgtgggacctaatacaatggctgcaggcggtggcgcaccaatggcagacaataacgaaggcgccgacggagtgggtagttcctcgggaaattggcattgcgattccacatggctgggcgacagagtcatcaccaccagcacccgaacctgggccctgcccacctacaacaaccacctctacaagcaaatctccaacgggacatcgggaggagccaccaacgacaacacctacttcggctacagcaccccctgggggtattttgactttaacagattccactgccacttttcaccacgtgactggcagcgactcatcaacaacaactggggattccggcccaagagactcagcttcaagctcttcaacatccaggtcaaggaggtcacgcagaatgaaggcaccaagaccatcgccaataacctcaccagcaccatccaggtgtttacggactcggagtaccagctgccgtacgttctcggctctgcccaccagggctgcctgcctccgttcccggcggacgtgttcatgattccccagtacggctacctaacactcaacaacggtagtcaggccgtgggacgctcctccttctactgcctggaatactttccttcgcagatgctgagaaccggcaacaacttccagtttacttacaccttcgaggacgtgcctttccacagcagctacgcccacagccagagcttggaccggctgatgaatcctctgattgaccagtacctgtactacttgtctcggactcaaacaacaggaggcacggcaagtacgcagactctgggcttcagccaaggtgggcctaatacaatggccaatcaggcaaagaactggctgccaggaccctgttaccgccaacaacgcgtctcaacgacaaccgggcaaaacaacaatagcaactttgcctggactgctgggaccaaataccatctgaatggaagaaattcattggctaatcctggcatcgctatggcaacacacaaagacgacgaggagcgtttttttcccagtaacgggatcctgatttttggcaaacaaaatgctgccagagacaatgcggattacagcgatgtcatgctcaccagcgaggaagaaatcaaaaccactaaccctgtggctacagaggaatacggtatcgtggcagataacttgcagcagcaaaacacggctcctcaaattggaactgtcaacagccagggggccttacccggtatggtctggcagaaccgggacgtgtacctgcagggtcccatctgggccaagattcctcacacggacggcaacttccacccgtctccgctgatgggcggctttggcctgaaacatcctccgcctcagatcctgatcaagaacacgcctgtacctgcggatcctccgaccaccttcaaccagtcaaagctgaactctttcatcacgcaatacagcaccggacaggtcagcgtggaaattgaatgggagctgcagaaggaaaacagcaagcgctggaaccccgagatccagtacacctccaactactacaaatctacaagtgtggactttgctgttaatacagaaggcgtgtactctgaaccccgccccattggcacccgttacctcacccgtaatctgtaa

SEQ ID NO: 1679 - DNA, 2217 bp, Artificial Sequence
  Synthetic Polynucleotide
atggctgccgatggttatcttccagattggctcgaggacaacctctctgagggcattcgcgagtggtgggcgctgaaacctggagccccgaagcccaaagccaaccagcaaaagcaggacgacggccggggtctggtgcttcctggctacaagtacctcggacccttcaacggactcgacaagggggagcccgtcaacgcggcggacgcagcggccctcgagcacgacaaggcctacgaccagcagctgcaggcgggtgacaatccgtacctgcggtataaccacgccgacgccgagtttcaggagcgtctgcaagaagatacgtcttttgggggcaacctcgggcgagcagtcttccaggccaagaagcgggttctcgaacctctcggtctggttgaggagggcgctaagacggctcctggaaagaagagaccggtagagccatcaccccagcgttctccagactcctctacgggcatcggcaagaaaggccaacagcccgccagaaaaagactcaattttggtcagactggcgactcagagtcagttccagaccctcaacctctcggagaacctccagcagcgccctctggtgtgggacctaatacaatggctgcaggcggtggcgcaccaatggcagacaataacgaaggcgccgacggagtgggtagttcctcgggaaattggcattgcgattccacatggctgggcgacagagtcatcaccaccagcacccgaacctgggccctgcccacctacaacaaccacctctacaagcaaatctccaacgggacatcgggaggagccaccaacgacaacacctacttcggctacagcaccccctgggggtattttgactttaacagattccactgccacttttcaccacgtgactggcagcgactcatcaacaacaactggggattccggcccaagagactcagcttcaagctcttcaacatccaggtcaaggaggtcacgcagaatgaaggcaccaagaccatcgccaataacctcaccagcaccatccaggtgtttacggactcggagtaccagctgccgtacgttctcggctctgcccaccagggctgcctgcctccgttcccggcggacgtgttcatgattccccagtacggctacctaacactcaacaacggtagtcaggccgtgggacgctcctccttctactgcctggaatactttccttcgcagatgctgagaaccggcaacaacttccagtttacttacaccttcgaggacgtgcctttccacagcagctacgcccacagccagagcttggaccggctgatgaatcctctgattgaccagtacctgtactacttgtctcggactcaaacaacaggaggcacggcaaatacgcagactctgggcttcagccaaggtgggcctaatacaatggccaatcaggcaaagaactggctgccaggaccctgttaccgccaacaacgcgtctcaacgacaaccgggcaaaacaacaatagcaactttgcctggactgctgggaccaaataccatctgaatggaagaaattcattggctaatcctggcatcgctatggcaacacacaaagacgacgaggagcgtttttttcccagtaacgggatcctgatttttggcaaacaaaatgctgccagagacaatgcggattacagcgatgtcatgctcaccagcgaggaagaaatcaaaaccactaaccctgtggctacagaggaatacggtatcgtggcagataacttgcagcagcaaaacacggctcctcaaattggaactgtcaacagccagggggccttacccggtatggtctggcagaaccgggacgtgtacctgcagggtcccatctgggccaagattcctcacacggacggcaacttccacccgtctccgctgatgggcggctttggcctgaaacatcctccgcctcagatcctgatcaagaacacgcctgtacctgcggatcctccgaccaccttcaaccagtcaaagctgaactctttcatcacgcaatacagcaccggacaggtcagcgtggaaattgaatgggagctgcagaaggaaaacagcaagcgctggaaccccgagatccagtacacctccaactactacaaatctacaagtgtggactttgctgttaatacagaaggcgtgtactctgaaccccgccccattggcacccgttacctcacccgtaatctgtaa

SEQ ID NO: 1680 - DNA, 2217 bp, Artificial Sequence
  Synthetic Polynucleotide
atggctgccgatggttatcttccagattggctcgaggacaacctctctgagggcattcgcgagtggtgggcgctgaaacctggagccccgaagcccaaagccaaccagcaaaagcaggacgacggccggggtcaggtgcttcctggctacaagtacctcggacccttcaacggactcgacaagggggagcccgtcaacgcggcggacgcagcggccctcgagcacgacaaggcctacgaccagcagctgcaggcgggtgacaatccgtacctgcggtataaccacgccgacgccgagtttcaggagcgtctgcaagaagatacgtcttttgggggcaacctcgggcgagcagtcttccaggccaagaagcgggttctcgaacctctcggtctggttgaggaaggcgctaagacggctcctggaaagaagagaccggtagagccatcaccccagcgttctccagactcctctacgggcatcggcaagaaaggccaacagcccgccagaaaaagactcaattttggtcagactggcgactcagagtcagttccagaccctcaacctctcggagaacctccagcagcgccctctggtgtgggacctaatacaatggctgcaggcggtggcgcaccaatggcagacaataacgaaggcgccgacggagtgggtagttcctcgggaaattggcattgcgattccacatggctgggcgacagagtcatcaccaccagcacccgaacctgggccctgcccacctacaacaaccacctctacaagcaaatctccaacgggacatcgggaggagccaccaacgacaacacctacttcggctacagcaccccctgggggtattttgactttaacagattccactgccacttttcaccacgtgactggcagcgactcatcaacaacaactggggattccggcccaagagactcagcttcaagctcttcaacatccaggtcaaggaggtcacgcagaatgaaggcaccaagaccatcgccaataacctcaccagcaccatccaggtgtttacggactcggagtaccagctgccgtacgttctcggctctgcccaccagggctgcctgcctccgttcccggcggacgtgttcatgattccccagtacggctacctaacactcaacaacggtagtcaggccgtgggacgctcctccttctactgcctggaatactttccttcgcagatgctgagaaccggcaacaacttccagtttacttacaccttcgaggacgtgcctttccacagcagctacgcccacagccagagcttggaccggctgatgaatcctctgattgaccagtacctgtactacttgtctcggactcaaacaacaggaggcacggcaaatacgcagactctgggcttcagccaaggtgggcctaatacaatggccaatcaggcaaagaactggctgccaggaccctgttaccgccaacaacgcgtctcaacgacaaccgggcaaaacaacaatagcaactttgcctggactgctgggaccaaataccatctgaatggaagaaattcattggctaatcctggcatcgctatggcaacacacaaagacgacgaggagcgtttttttcccagtaacgggatcctgatttttggcaaacaaaatgctgccagagacaatgcggattacagcgatgtcatgctcaccagcgaggaagaaatcaaaaccactaaccctgtggctacagaggaatacggtatcgtggcagataacttgcagcagcaaaacacggctcctcaaattggaactgtcaacagccagggggccttacccggtatggtctggcagaaccgggacgtgtacctgcagggtcccgtctgggccaagattcctcacacggacggcaacttccacccgtctccgctgatgggcggctttggcctgaaacatcctccgcctcagatcctgatcaagaacacgcctgtacctgcggatcctccgaccaccttcaaccagtcaaagctgaactctttcatcacgcaatacagcaccggacaggtcagcgtggaaattgaatgggagctgcagaaggaaaacagcaagcgctggaaccccgagatccagtacacctccaactactacaaatctacaagtgtggactttgctgttaatacagaaggcgtgtactctgaaccccgccccattggcacccgttacctcacccgtaatctgtaa

SEQ ID NO: 1681 - DNA, 2217 bp, Artificial Sequence
  Synthetic Polynucleotide
atggctgccgatggttatcttccagattggctcgaggacaacctctctgagggcattcgcgagtggtgggcgctgaaacctggagccccgaagcccaaagccaaccagcaaaagcaggacgacggccggggtctggtgcttcctggctacaagtacctcggacccttcaacggactcgacaagggggagcccgtcaacgcggcggacgcagcggccctcgagcacgacaaggcctacgaccagcagctgcaggcgggtgacaatccgtacctgcggtataaccacgccgacgccgagtttcaggagcgtctgcaagaagatacgtcttttgggggcaacctcgggcgagcagtcttccaggccaagaagcgggttctcgaacctctcggtctggttgaggaaggcgctaagacggctcctggaaagaagagaccggtagagccatcaccccagcgttctccagactcctctacgggcatcggcaagaaaggccaacagcccgccagaaaaagactcaattttggtcagactggcgactcagagtcagttccagaccctcaacctctcggagaacctccagcagcgccctctggtgtgggacctaatacaatggctgcaggcggtggcgcaccaatggcagacaataacgaaggcgccgacggagtgggtagttcctcgggaaattggcattgcgattccacatggctgggcgacagagtcatcaccaccagcacccgaacctgggccctgcccacctacaacaaccacctctacaagcaaatctccaacgggacatcgggaggagccaccaacgacaacacctacttcggctacagcaccccctgggggtattttgactttaacagattccactgccacttttcaccacgtgactggcagcgactcatcaacagcaactggggattccggcccaagagactcagcttcaagctcttcaacatccaggtcaaggaggtcacgcagaatgaaggcaccaagaccatcgccaataacctcaccagcaccatccaggtgtttacggactcggagtaccagctgccgtacgttctcggctctgcccaccagggctgcctgcctccgttcccggcggacgtgttcatgattccccagtacggctacctaacactcaacaacggtagtcaggccgtgggacgctcctccttctactgcctggaatactttccttcgcagatgctgagaaccggcaacaacttccagtttacttacaccttcgaggacgtgcctttccacagcagctacgcccacagccagagcttggaccggctgatgaatcctctgattgaccagtacctgtactacttgtctcggactcaaacaacaggaggcacggcaaatacgcagactctgggcttcagccaaggtgggcctaatacaatggccaatcaggcaaagaactggctgccaggaccctgttaccgccaacaacgcgtctcaacgacaaccgggcaaaacaacaatagcaactttgcctggactgctgggaccaaataccatctgaatggaagaaattcattggctaatcctggcatcgctatggcaacacacaaagacgacgaggagcgtttttttcccagtaacgggatcctgatttttggcaaacaaaatgctgccagagacaatgcggattacagcgatgtcatgctcaccagcgaggaagaaatcaaaaccactaaccctgtggctacagaggaatacggtatcgtggcagataacttgcagcagcaaaacacggctcctcaaattggaactgtcaacagccagggggccttacccggtatggtctggcagaaccgggacgtgtacctgcagggtcccatctgggccaagattcctcacacggacggcaacttccacccgtctccgctgatgggcggctttggcctgaaacatcctccgcctcagatcctgatcaagaacacgcctgtacctgcggatcctccgaccaccttcaaccagtcaaagctgaactctttcatcacgcaatacagcaccggacaggtcagcgtggaaattgaatgggagctgcagaaggaaaacagcaagcgctggaaccccgagatccagtacacctccaactactacaaatctacaagtgtggactttgctgttaatacagaaggcgtgtactctgaaccccgccccattggcacccgttacctcacccgtaatctgtaa

SEQ ID NO: 1682 - DNA, 2217 bp, Artificial Sequence
  Synthetic Polynucleotide
atggctgccgatggttatcttccagattggctcgaggacaacctctctgagggcattcgcgagtggtgggcgctgaaacctggagccccgaagcccaaagccaaccagcaaaagcaggacgacggccggggtctggtgcttcctggctacaagtacctcggacccttcaacggactcgacaagggggagcccgtcaacgcggcggacgcagcggccctcgagcacgacaaggcctacgaccagcagctgcaggcgggtgacaatccgtacctgcggtataaccacgccgacgccgagtttcaggagcgtctgcaagaagatacgtcttttgggggcaacctcgggcgagcagtcttccaggccaagaagcgggttctcgaacctctcggtctggttgaggagggcgctaagacggctcctggaaagaagagaccggtagagccatcaccccagcgttctccagactcctctacgggcatcggcaagaaaggccaacagcccgccagaaaaagactcaattttggtcagactggcgactcagagtcagttccagaccctcaacctctcggagaacctccagcagcgccctctggtgtgggacctaatacaatggctgcaggcggtggcgcaccaatggcagacaataacgaaggcgccgacggagtgggtagttcctcgggaaattggcattgcgattccacatggctgggcgacagagtcatcaccaccagcacccgaacctgggccctgcccacctacaacaaccacctctacaagcaaatctccaacgggacatcgggaggagccaccaacgacaacacctacttcggctacagcaccccctgggggtattttgactttaacagattccactgccacttttcaccacgtgactggcagcgactcatcaacaacaactggggattccggcccaagagactcagcttcaagctcttcaacatccaggtcaaggaggtcacgcagaatgaaggcaccaagaccatcgccaataacctcaccagcaccatccaggtgtttacggactcggagtaccagctgccgtacgttctcggctctgcccaccagggctgcctgcctccgttcccggcggacgtgttcacgattccccagtacggctacctaacactcaacaacggtagtcaggccgtgggacgctcctccttctactgcctggaatactttccttcgcagatgctgagaaccggcaacaacttccagtttacttacaccttcgaggacgtgcctttccacagcagctacgcccacagccagagcttggaccggctgatgaatcctctgattgaccagtacctgtactacttgtctcggactcaaacaacaggaggcacggcaaatacgcagactctgggcttcagccaaggtgggcctaatacaatggccaatcaggcaaagaactggctgccaggaccctgttaccgccaacaacgcgtctcaacgacaaccgggcaaaacaacaatagcaactttgcctggactgctgggaccaaataccatctgaatggaagaaattcattggctaatcctggcatcgctatggcaacacacaaagacgacgaggagcgtttttttcccagtaacgggatcctgatttttggcaaacaaaatgctgccagagacaatgcggattacagcgatgtcatgctcaccagcgaggaagaaatcaaaaccactaaccctgtggctacagaggaatacggtatcgtggcagataacttgcagcagcaaaacacggctcctcaaattggaactgtcaacagccagggggccttacccggtatggtctggcagaaccgggacgtgtacctgcagggtcccatctgggccaagattcctcacacggacggcaacttccacccgtctccgctgatgggcggctttggcctgaaacatcctccgcctcagatcctgatcaagaacacgcctgtacctgcggatcctccgaccaccttcaaccagtcaaagctgaactctttcatcacgcaatacagcaccggacaggtcagcgtggaaattgaatgggagctgcagaaggaaaacagcaagcgctggaaccccgagatccagtacacctccaactactacaaatctacaagtgtggactttgctgttaatacagaaggcgtgtactctgaaccccgccccattggcacccgttacctcacccgtaatctgtaa

SEQ ID NO: 1683 - DNA, 2217 bp, Artificial Sequence
  Synthetic Polynucleotide
atggctgccgatggttatcttccagattggctcgaggacaacctctctgagggcattcgcgagtggtgggcgctgaaacctggagccccgaagcccaaagccaaccagcaaaagcaggacgacggccggggtctggtgcttcctggctacaagtacctcggacccttcaacggactcgacaagggggagcccgtcaacgcggcggacgcagcggccctcgagcacgacaaggcctacgaccagcagctgcaggcgggtgacaatccgtacctgcggtataaccacgccgacgccgagtttcaggagcgtctgcaagaagatacgtcttttgggggcaacctcgggcgagcagtcttccaggccaagaagcgggttctcgaacctctcggtctggttgaggaaggcgctaagacggctcctggaaagaagagaccggtagagccatcaccccagcgttctccagactcctctacgggcatcggcaagaaaggccaacagcccgccagaaaaagactcaattttggtcagactggcgactcagagtcagttccagaccctcaacctctcggagaacctccagcagcgccctctggtgtgggacctaatacaatggctgcaggcggtggcgcaccaatggcagacaataacgaaggcgccgacggagtgggtagttcctcgggaaattggcattgcgattccacatggctgggcgacagagtcatcaccaccagcacccgaacctgggccctgcccacctacaacaaccacctctacaagcaaatctccaacgggacatcgggaggagccaccaacgacaacacctacttcggctacagcaccccctgggggtattttgactttaacagattccactgccacttttcaccacgtgactggcagcgactcatcgacaacaactggggattccggcccaagagactcagcttcaagctcttcaacatccaggtcaaggaggtcacgcagaatgaaggcaccaagaccatcgccaataacctcaccagcaccatccaggtgtttacggactcggagtaccagctgccgtacgttctcggctctgcccaccagggctgcctgcctccgttcccggcggacgtgttcatgattccccagtacggctacctaacactcaacaacggtagtcaggccgtgggacgctcctccttctactgcctggaatactttccttcgcagatgctgagaaccggcaacaacttccagtttacttacaccttcgaggacgtgcctttccacagcagctacgcccacagccagagcttggaccggctgatgaatcctctgattgaccagtacctgtactacttgtctcggactcaaacaacaggaggcacggcaaatacgcagactctgggcttcagccaaggtgggcctaatacaatggccaatcaggcaaagaactggctgccaggaccctgttaccgccaacaacgcgtctcaacgacaaccgggcaaaacaacaatagcaactttgcctggactgctgggaccaaataccatctgaatggaagaaattcattggctaatcctggcatcgctatggcaacacacaaagacgacgaggagcgtttttttcccagtaacgggatcctgatttttggcaaacaaaatgctgccagagacaatgcggattacagcgatgtcatgctcaccagcgaggaagaaatcaaaaccactaaccctgtggctacagaggaatacggtatcgtggcagataacttgcagcagcaaaacacggctcctcaaattggaactgtcaacagccagggggccttacccggtatggtctggcagaaccgggacgtgtacctgcagggtcccatctgggccaagattcctcacacggacggcaacttccacccgtctccgctgatgggcggctttggcctgaaacatcctccgcctcagatcctgatcaagaacacgcctgtacctgcggatcctccgaccaccttcaaccagtcaaagctgaactctttcatcacgcaatacagcaccggacaggtcagcgtggaaattgaatgggagctgcagaaggaaaacagcaagcgctggaaccccgagatccagtacacctccaactactacaaatctacaagtgtggactttgctgttaatacagaaggcgtgtactctgaaccccgccccattggcacccgttacctcacccgtaatctgtaa

SEQ ID NO: 1684 - DNA, 2217 bp, Artificial Sequence
  Synthetic Polynucleotide
atggctgccgatggttatcttccagattggctcgaggacaacctctctgagggcattcgcgagtggtgggcgctgaaacctggagccccgaagcccaaagccaaccagcaaaagcaggacgacggccggggtctggtgcttcctggctacaagtacctcggacccttcaacggactcgacaagggggagcccgtcaacgcggcggacgcagcggccctcgagcacgacaaggcctacgaccagcagctgcaggcgggtgacaatccgtacctgcggtataaccacgccgacgccgagtttcaggagcgtctgcaagaagatacgtcttttgggggcaacctcgggcgagcagtcttccaggccaagaagcgggttctcgaacctctcggtctggttgaggaaggcgctaagacggctcctggaaagaagagaccggtagagccatcaccccagcgttctccagactcctctacgggcatcggcaagaaaggccaacagcccgccagaaaaagactcaattttggtcagactggcgactcagagtcagttccagaccctcaacctctcggagaacctccagcagcgccctctggtgtgggacctaatacaatggctgcaggcggtggcgcaccaatggcagacaataacgaaggcgccgacggagtgggtagttcctcgggaaattggcattgcgattccacatggctgggcgacagagtcatcaccaccagcacccgaacctgggccctgcccgcctacaacaaccacctctacaagcaaatctccaacgggacatcgggaggagccaccaacgacaacacctacttcggctacagcaccccctgggggtattttgactttaacagattccactgccacttttcaccacgtgactggcagcgactcatcaacaacaactggggattccggcccaagagactcagcttcaagctcttcaacatccaggtcaaggaggtcacgcagaatgaaggcaccaagaccatcgccaataacctcaccagcaccatccaggtgtttacggactcggagtaccagctgccgtacgttctcggctctgcccaccagggctgcctgcctccgttcccggcggacgtgttcacgattccccagtacggctacctaacactcaacaacggtagtcaggccgtgggacgctcctccttctactgcctggaatactttccttcgcagatgctgagaaccggcaacaacttccagtttacttacaccttcgaggacgtgcctttccacagcagctacgcccacagccagagcttggaccggctgatgaatcctctgattgaccagtacctgtactacttgtctcggactcaaacaacaggaggcacggcaaatacgcagactctgggcttcagccaaggtgggcctaatacaatggccaatcaggcaaagaactggctgccaggaccctgttaccgccaacaacgcgtctcaacgacaaccgggcaaaacaacaatagcaactttgcctggactgctgggaccaaataccatctgaatggaagaaattcattggctaatcctggcatcgctatggcaacacacaaagacgacgaggagcgtttttttcccagtaacgggatcctgatttttggcaaacaaaatgctgccagagacaatgcggattacagcgatgtcatgctcaccagcgaggaagaaatcaaaaccactaaccctgtggctacagaggaatacggtatcgtggcagataacttgcagcagcaaaacacggctcctcaaattggaactgtcaacagccagggggccttacccggtatggtctggcagaaccgggacgtgtacctgcagggtcccatctgggccaagattccacacacggacggcaacttccacccgtctccgctgatgggcggctttggcctgaaacatcctccgcctcagatcctgatcaagaacacgcctgtacctgcggatcctccgaccaccttcaaccagtcaaagctgaactctttcatcacgcaatacagcaccggacaggtcagcgtggaaattgaatgggagctgcagaaggaaaacagcaagcgctggaaccccgagatccagtacacctccaactactacaaatctacaaatgtggactttgctgttaatacagaaggcgtgtactctgaaccccgccccattggcacccgttacctcacccgtaatctgtaa

SEQ ID NO: 1685 - DNA, 2217 bp, Artificial Sequence
  Synthetic Polynucleotide
atggctgccgatggttatcttccagattggctcgaggacaacctctctgagggcattcgcgagtggtgggcgctgaaacctggagccccgaagcccaaagccaaccagcaaaagcaggacgacggccggggtctggtgcttcctggctacaagtacctcggacccttcaacggactcgacaagggggagcccgtcaacgcggcggacgcagcggccctcgagcacgacaaggcctacgaccagcagctgcaggcgggtgacaatccgtacctgcggtataaccacgccgacgccgagtttcaggagcgtctgcaagaagatacgtcttttgggggcaacctcgggcgagcagtcttccaggccaagaagcgggttctcgaacctctcggtctggttgaggaaggcgctaagacggctcctggaaagaagagaccggtagagccatcaccccagcgttctccagactcctctacgggcatcggcaagaaaggccaacagcccgccagaaaaagactcaattttggtcagactggcgactcagagtcagttccagaccctcaacctctcggagaacctccagcagcgccctctggtgtgggacctaatacaatggctgcaggcggtggcgcaccaatggcagacaataacgaaggcgccgacggagtgggtagttcctcgggaaattggcattgcgattccacatggctgggcgacagagtcatcaccaccagcacccgaacctgggccctgcccacctacaacaaccacctctacaagcaaatctccaacgggacatcgggaggagccaccaacgacaacacctacttcggctacagcaccccctgggggtattttgactttaacagattccactgccacttttcaccacgtgactggcagcgactcatcaacaacaactggggattccggcccaagagactcagcttcaagctcttcaacatccaggtcaaggaggtcacgcagaatgaaggcaccaagaccatcgccaataacctcaccagcaccatccaggtgtttacggactcggagtaccagctgccgtacgttctcggctctgcccaccagggctgcctgcctccgttcccggcggacgtgttcatgattccccagtacggctacctaacactcaacgacggtagtcaggccgtgggacgctcctccttctactgcctggaatactttccttcgcagatgctgagaaccggcaacaacttccagtttacttacaccttcgaggacgtgcctttccacagcagctacgcccacagccagagcttggaccggctgatgaatcctctgattgaccagtacctgtactacttgtctcggactcaaacaacaggaggcacggcaaatacgcagactctgggcttcagccaaggtgggcctaatacaatggccaatcaggcaaagaactggctgccaggaccctgttaccgccaacaacgcgtctcaacgacaaccgggcaaaacaacaatagcaactttgcctggactgctgggaccaaataccatctgaatggaagaaattcattggctaatcctggcatcgctatggcaacacacaaagacgacgaggagcgtttttttcccagtaacgggatcctgatttttggcaaacaaaatgctgccagagacaatgcggattacagcgatgtcatgctcaccagcgaggaagaaatcaaaaccactaaccctgtggctacagaggaatacggtatcgtggcagataacttgcagcagcaaaacacggctcctcaaattggaactgtcaacagccagggggccttacccggtatggtctggcagaaccgggacgtgtacctgcagggtcccatctgggccaagattcctcacacggacggcaacttccacccgtctccgctgatgggcggctttggcctgaaacatcctccgcctcagatcctgatcaagaacacgcctgtacctgcggatcctccgaccaccttcaaccagtcaaagctgaactctttcatcacgcaatacagcaccggacaggtcagcgtggaaattgaatgggagctgcagaaggaaaacagcaagcgctggaaccccgagatccagtacacctccaactactacaaatctacaagtgtggactttgctgttaatacagaaggcgtgtactctgaaccccgccccattggcacccgttacctcacccgtaatctgtaa

SEQ ID NO: 1686 - DNA, 2217 bp, Artificial Sequence
  Synthetic Polynucleotide
atggctgccgatggttatcttccagattggctcgaggacaacctctctgagggcattcgcgagtggtgggcgctgaaacctggagccccgaagcccaaagccaaccagcaaaagcaggacgacggccggggtctggtgcttcctggctacaagtacctcggacccttcaacggactcgacaagggggagcccgtcaacgcggcggacgcagcggccctcgagcacgacaaggcctacgaccagcagctgcaggcgggtgacaatccgtacctgcggtataaccacgccgacgccgagtttcaggagcgtctgcaagaagatacgtcttttgggggcaacctcgggcgagcagtcttccaggccaagaagcgggttctcgaacctctcggtctggttgaggaaggcgctaagacggctcctggaaagaagagaccggtagagccatcaccccagcgttctccagactcctctacgggcatcggcaagaaaggccaacagcccgccagaaaaagactcaattttggtcagactggcgactcagagtcagttccagaccctcaacctctcggagaacctccagcagcgccctctggtgtgggacctaatacaatggctgcaggcggtggcgcaccaatggcagacaataacgaaggcgccgacggagtgggtagttcctcgggaaattggcattgcgattccacatggctgggcgacagagtcatcaccaccagcacccgaacctgggcccagcccacctacaacaaccacctctacaagcaaatctccaacgggacatcgggaggagccaccaacgacaacacctacttcggctacagcaccccctgggggtattttgactttaacagattccactgccacttttcaccacgtgactggcagcgactcatcaacaacaactggggattccggcccaagagactcagcttcaagctcttcaacatccaggtcaaggaggtcacgcagaatgaaggcaccaagaccatcgccaataacctcaccagcaccatccaggtgtttacggactcggagtaccagctgccgtacgttctcggctctgcccaccagggctgcctgcctccgttcccggcggacgtgttcatgattccccagtacggctacctaacactcaacaacggtagtcaggccgtgggacgctcctccttctactgcctggaatactttccttcgcagatgctgagaaccggcaacaacttccagtttacttacaccttcgaggacgtgcctttccacagcagctacgcccacagccagagcttggaccggctgatgaatcctctgattgaccagtacctgtactacttgtctcggactcaaacaacaggaggcacggcaaatacgcagactctgggcttcagccaaggtgggcctaatacaatggccaatcaggcaaagaactggctgccaggaccctgttaccgccaacaacgcgtctcaacgacaaccgggcaaaacaacaatagcaactttgcctggactgctgggaccaaataccatctgaatggaagaaattcattggctaatcctggcatcgctatggcaacacacaaagacgacgaggagcgtttttttcccagtaacgggatcctgatttttggcaaacaaaatgctgccagagacaatgcggattacagcgatgtcatgctcaccagcgaggaagaaatcaaaaccactaaccctgtggctacagaggaatacggtatcgtggcagataacttgcagcagcaaaacacggctcctcaaattggaactgtcaacagccagggggccttacccggtatggtctggcagaaccgggacgtgtacctgcagggtcccatctgggccaagattcctcacacggacggcaacttccacccgtctccgctgatgggcggctttggcctgaaacatcctccgcctcagatcctgatcaagaacacgcctgtacctgcggatcctccgaccaccttcaaccagtcaaagctgaactctttcatcacgcaatacagcaccggacaggtcagcgtggaaattgaatgggagctgcagaaggaaaacagcaagcgctggaaccccgagatccagtacacctccaactactacaaatctacaagtgtggactttgctgttaatacagaaggcgtgtactctgaaccccgccccattggcacccgttacctcacccgtaatctgtaa

SEQ ID NO: 1687 - DNA, 2208 bp, Artificial Sequence
  Synthetic Polynucleotide
atggctgccgatggttatcttccagattggctcgaggacactctctctgaaggaataagacagtggtggaagctcaaacctggcccaccaccgccaaagcccgcagagcggcataaggacgacagcaggggtcttgtgcttcctgggtacaagtacctcggacccttcaacggactcgacaaaggagagccggtcaacgaggcagacgccgcggccctcgagcacgacaaggcctacgaccggcagctcgacagcggagacaacccgtacctcaagtacaaccacgccgacgcggagtttcaggagcgccttaaagaagatacgtcttttgggggcaacctcggacgagcagtcttccaggcgaaaaagagggttcttgaacctctgggcctggttgaggaacctgttaagacggctccgggaaaaaagaggccggtagagcactctcctgcggagccagactcctcctcgggaaccggaaaggcgggccagcagcctgcgagaaagagattgaatttcggtcagactggagacgcagactccgtacctgacccccagcctctcggacagccaccagcagccccctctggtctgggaactaatacgatggctacaggcagtggcgcaccaatggcagacaataacgagggcgccgacggagtgggtaattcctcgggaaattggcattgcgattccacatggatgggcgacagagtcatcaccaccagcacccgcacctgggctctgcccacctacaacaaccatctgtacaagcaaatttccagccaatcaggagcatcgaacgacaaccactactttggctacagcaccccctgggggtattttgacttcaacagattccactgccacttttcgccacgtgactggcaaagactcatcaacaacaactggggattccggcccaagagactcagcttcaagctctttaacattcaagtcaaggaggtcacgcagaatgacggtacgacgacgattgccaataaccttaccagcacggttcaggtctttactgactcggagtaccagctcccgtacgtcctcggctcggcgcatcaaggatgcctcccgccgtttccagcggacgtcttcatggtcccacagtatggatacctcaccctgaacaacgggagtcaggcggtaggacgctcttccttttactgcctggagtactttccttctcagatgcttcgtactggaaacaactttaccttcagctacacctttgaagacgttcctttccacagcagctacgctcacagccaaagtctggaccgtctcatgaatcctctcatcgaccagtacctgtattacttgagcaaaacaaacgctccaagcggaaccaccacgatgtccaggcttcagttttctcaggccggagcaagtgacattcgggaccagtctagaaactggcttcctggaccctgttaccgccagcagcgagtatcaaagacagctgcggacaacaacaacagtgattactcgtggactggagctaccaagtaccacctcaatggaagagactctctggtgaacccgggcccagctatggccagccacaaggacgatgaagaaaaatattttcctcagagcggggttctcatcttcgggaaacaaggctcaaataaaactaatgtggacattgaaaaggtcatgattacagacgaagaggaaatcaggaccaccaatcccgtggctacggagcagtacggtgctgtatctaccaaccttcaaagcggcaacacacaagcagctacctcagatgtcaacacacaaggcgttcttcctggcatggtctggcaggacagagacgtgtacctgcaggggcccatctgggcaaagattccccacacggatggacactttcacccttctcctcttatgggaggatttggattgaagcaccctcccccacagattctcatcaagaataccccggtacctgcgaatccttctaccaccttcagtgcggcaaagtttgcttctttcatcacacagtactccacagggcaggtcagcgtggagatcgagtgggagctgcagaaagagaacagcaaacgctggaaccccgagattcagtatacctccaactacaacaagtctgttaatgtggactttactgtggacactaatggcgtgtattcagagcctcgccccattggcacaagatacctgactcgtaatctgtaa

SEQ ID NO: 1688 - DNA, 2208 bp, Artificial Sequence
  Synthetic Polynucleotide
atggctgccgatggttatcttccagattggctcgaggacactctctctgaaggaataagacagtggtggaagctcaaacctggcccaccaccgccaaagcccgcagagcggcataaggacgacagcaggggtcttgtgcttcctgggtacaagtacctcggacccttcaacggactcgacaaaggagagccggtcaacgaggcagacgccgcggccctcgagcacgacaaggcctacgaccggcagctcgacagcggagacaacccgtacctcaagtacaaccacgccgacgcggagtttcaggagcgccttaaagaagatacgtcttttgggggcaacctcggacgagcagtcttccaggcgaaaaagagggttcttgaacctctgggcctggttgaggaacctgttaagacggctccgggaaaaaagaggccggtagagcactctcctgcggagccagactcctcctcgggaaccggaaaggcgggccagcagcctgcgagaaagagattgaatttcggtcagactggagacgcagactccgtacctgacccccagcctctcggacagccaccagcagccccctctggtctgggaactaatacgatggctacaggcagtggcgcaccaatggcagacaataacgagggcgccgacggagtgggtaattcctcgggaaattggcattgcgattccacatggatgggcgacagagtcatcaccaccagcacccgcacctgggctctgcccacctacaacaaccatctgtacaagcaaatttccagccaatcaggagcatcgaacgacaaccactactttggctacagcaccccctgggggtattttgacttcaacagattccactgccacttttcgccacgtgactggcaaagactcatcaacaacaactggggattccggcccaagagactcagcttcaagctctttaacattcaagtcaaggaggtcacgcagaatgacggtacgacgacgattgccaataaccttaccagcacggttcaggtctttactgactcggagtaccagctcccgtacgtcctcggctcggcgcatcaaggatgcctcccgccgtttccagcggacgtcttcatggtcccacagtatggatacctcaccctgaacaacgggagtcaggcggtaggacgctcttccttttactgcctggagtactttccttctcagatgcttcgtactggaaacaactttaccttcagctacacctttgaagacgttcctttccacagcagctacgctcacagccaaagtctggaccgtctcatgaatcctctcatcgaccagtacctgtattacttgagcaaaacaaacgctccaagcggaaccaccacgatgtccaggcttcagttttctcaggccggagcaagtgacattcgggaccagtctagaaactggcttcctggaccctgttaccgccagcagcgagtatcaaagacagctgcggacaacaacaacagtgattactcgtggactggagctaccaagtaccacctcaatggaagagactctctggtgaacccgggcccagctatggccagccacaaggacgatgaagaaaaaatatttcctcagagcggggttctcatcttcgggaaacaaggctcaaataaaactaatgtggacattgaaaaggtcatgattacagacgaagaggaaatcaggaccaccaatcccgtggctacggagcagtacggtgctgtatctaccaaccttcaaagcggcaacacacaagcagctacctcagatgtcaacacacaaggcgttcttcctggcatggtctggcaggacagagacgtgtacctgcaggggcccatctgggcaaagattccccacacggatggacactttcacccttctcctcttatgggaggatttggattgaagcaccctcccccacagattctcatcaagaataccccggtacctgcgaatccttctaccaccttcagtgcggcaaagtttgcttctttcatcacacagtactccacagggcaggtcagcgtggagatcgagtgggagctgcagaaagagaacagcaaacgctggaaccccgagattcagtatacctccaactacaacaagtctgttaatgtggactttactgtggacactaatggcgtgtattcagagcctcgccccattggcacaagatacctgactcgtaatctgtaa

SEQ ID NO: 1689 - DNA, 2208 bp, Artificial Sequence
  Synthetic Polynucleotide
atggctgccgatggttatcttccagattggctcgaggacactctctctgaaggaataagacagtggtggaagctcaaacctggcccaccaccgccaaagcccgcagagcggcataaggacgacagcaggggtcttgtgcttcctgggtacaagtacctcggacccttcaacggactcgacaaaggagagccggtcaacgaggcagacgccgcggccctcgagcacgacaaggcctacgaccggcagctcgacagcggagacaacccgtacctcaagtacaaccacgccgacgcggagtttcaggagcgccttaaagaagatacgtcttttgggggcaacctcggacgagcagtcttccaggcgaaaaagagggttcttgaacctctgggcctggttgaggaacctgttaagacggctccgggaaaaaagaggccggtagagcactctcctgcggagccagactcctcctcgggaaccggaaaggcgggccagcagcctgcgagaaagagattgaatttcggtcagactggagacgcagactccgtacctgacccccagcctctcggacagccaccagcagccccctctggtctgggaactaatacgatggctacaggcagtggcgcaccaatggcagacaataacgagggcgccgacggagtgggtaattcctcgggaaattggcattgcgattccacatggatgggcgacagagtcatcaccaccagcacccgcacctgggctctgcccacctacaacaaccatctgtacaagcaaatttccagccaatcaggagcatcgaacgacaaccactactttggctacagcaccccctgggggtattttgacttcaacagattccactgccacttttcgccacgtgactggcaaagactcatcaacaacaactggggattccggcccaagagactcagcttcaagctctttaacattcaagtcaaggaggtcacgcagaatgacggtacgacgacgattgccaataaccttaccagcacggttcaggtctttactgactcggagtaccagctcccgtacgccctcggctcggcgcatcaaggatgcctcccgccgtttccagcggacgtcttcatggtcccacagtatggatacctcaccctgaacaacgggagtcaggcggtaggacgctcttccttttactgcctggagtactttccttctcagatgcttcgtactggaaacaactttaccttcagctacacctttgaagacgttcctttccacagcagctacgctcacagccaaagtctggaccgtctcatgaatcctctcatcgaccagtacctgtattacttgagcaaaacaaacgctccaagcggaaccaccacgatgtccaggcttcagttttctcaggccggagcaagtgacattcgggaccagtctagaaactggcttcctggaccctgttaccgccagcagcgagtatcaaagacagctgcggacaacaacaacagtgattactcgtggactggagctaccaagtaccaccccaatggaagagactctctggtgaacccgggcccagctatggccagccacaaggacgatgaagaaaaatattttcctcagagcggggttctcatcttcgggaaacaaggctcaaataaaactaatgtggacattgaaaaggtcatgattacagacgaagaggaaatcaggaccaccaatcccgtggctacggagcagtacggtgctgtatctaccaaccttcaaagcggcaacacacaagcagctacctcagatgtcaacacacaaggcgttcttcctggcatggtctggcaggacagagacgtgtacctgcaggggcccatctgggcaaagattccccacacggatggacactctcacccttctcctcttatgggaggatttggattgaagcaccctcccccacagattctcatcaagaataccccggtacctgcgaatccttctaccaccttcagtgcggcaaagtttgcttctttcatcacacagtactccacagggcaggtcagcgtggagatcgagtgggagctgcagaaagagaacagcaaacgctggaaccccgagattcagtatacctccaactacaacaagtctgttaatgtggactttactgtggacactaatggcgtgtattcagagcctcgccccattggcacaagatacctgactcgtaatctgtaa

SEQ ID NO: 1690 - DNA, 2205 bp, Artificial Sequence
  Synthetic Polynucleotide
atggctgccgatggttatcttccagattggctcgaggacactctctctgaaggaataagacagtggtggaagctcaaacctggcccaccaccgccaaagcccgcagagcggcataaggacgacagcaggggtcttgtgcttcctgggtacaagtacctcggacccttcaacggactcgacaaaggagagccggtcaacgaggcagacgccgcggccctcgagcacgacaaggcctacgaccggcagctcgacagcggagacaacccgtacctcaagtacaaccacgccgacgcggagtttcaggagcgccttaaagaagatacgtcttttgggggcaacctcggacgagcagtcttccaggcgaaaaagagggttcttgaacctctgggcctggttgaggaacctgttaagacggctccgggaaaaaagaggccggtagagcactctcctgcggagccagactcctcctcgggaaccggaaaggcgggccagcagcctgcgagaaagagattgaatttcggtcagactggagacgcagactccgtacctgacccccagcctctcggacagccaccagcagccccctctggtctgggaactaatacgatggctacaggcagtggcgcaccaatggcagacaataacgagggcgccgacggagtgggtaattcctcgggaaattggcattgcgattccacatggatgggcgacagagtcatcaccaccagcacccgcacctgggctctgcccacctacaacaaccatctgtacaagcaaatttccagccaatcaggagcatcgaacgacaaccactactttggctacagcaccccctgggggtattttgacttcaacagattccactgccacttttcgccacgtgactggcaaagactcatcaacaacaactggggattccggcccaagagactcagcttcaagctctttaacattcaagtcaaggaggtcacgcagaatgacggtacgacgacgattgccaataaccttaccagcacggttcaggtctttactgactcggagtaccagctcccgtacgtcctcggctcggcgcatcaaggatgcctcccgccgtttccagcggacgtcttcatggtcccacagtatggatacctcaccctgaacaacgggagtcaggcggtaggacgctcttccttttactgcctggagtactttccttctcagatgcttcgtactggaaacaactttaccttcagctacacctttgaagacgttcctttccacagcagctacgctcacagccaaagtctggaccgtctcatgaatcctctcatcgaccagtacctgtattacttgagcaaaacaaacgctccaagcggaaccaccacgatgtccaggcttcagttttctcaggccggagcaagtgacattcgggaccagtctagaaactggcttcctggaccctgttaccgccagcagcgagtatcaaagacagctgcggacaacaacagtgattactcgtggactggagctaccaagtaccacctcaatggaagagactctctggtgaacccgggcccagctatggccagccacaaggacgatgaagaaaaatattttcctcagagcggggttctcatcttcgggaaacaaggctcaaataaaactaatgtggacattgaaaaggtcatgattacagacgaagaggaaatcaggaccaccaatcccgtggctacggagcagtacggtgctgtatctaccaaccttcaaagcggcaacacacaagcagctacctcagatgtcaacacacaaggcgttcttcctggcatggtctggcaggacagagacgtgtacctgcaggggcccatctgggcaaagattccccacacggatggacactttcacccttctcctcttatgggaggatttggattgaagcaccctcccccacagattctcatcaagaataccccggtacctgcgaatccttctaccaccttcagtgcggcaaagtttgcttctttcatcacacagtactccacagggcaggtcagcgtggagatcgagtgggagctgcagaaagagaacagcaaacgctggaaccccgagattcagtatacctccaactacaacaagtctgttaatgtggactttactgtggacactaatggcgtgtattcagagcctcgccccattggcacaagatacctgactcgtaatctgtaa

SEQ ID NO: 1691 - DNA, 2208 bp, Artificial Sequence
  Synthetic Polynucleotide
atggctgccgatggttatcttccagattggctcgaggacactctctctgaaggaataagacagtggtggaagctcaaacctggcccaccaccgccaaagcccgcagagcggcataaggacgacagcaggggtcttgtgcttcctgggtacaagtacctcggacccttcaacggactcgacaaaggagagccggtcaacgaggcagacgccgcggccctcgagcacgacaaggcctacgaccggcagctcgacagcggagacaacccgtacctcaagtacaaccacgccgacgcggagtttcaggagcgccttaaagaagatacgtcttttgggggcaacctcgcaagagcagtattccaggcgaaaaagagggttcttgaacctctgggcctggttgaggagcctgttaagacggctccgggaaaaaagaggccggtagagcactctcctgcggagccagattcctcctccggaactggaaagtcgggccaacagcctgcaagaaagagattgaattttggtcagactggagacgcagactccgtacctgacccccagcctctcggacagccaccagcagccccctctggtctgggaactaatacgatggcttcaggcagtggcgcaccaatggcagacaataacgagggcgccgacggagtgggtaattcctcgggaaattggcattgcgattccacatggatgggcgacagagtcatcaccaccagcacccgcacctgggctctgcccacctacaacaaccatctgtacaagcaaatttccagccagtctggagccagcaacgacaaccactactttggctacagcaccccttgggggtattttgacttcaacagattccactgccacttctccccacgtgactggcaaagactcatcaacaacaattggggattccggcccaaaagactcaacttcaagctctttaacattcaagtcaaggaggtcacgcagaatgacggtacgacgacgattgccaataaccttaccagcacggttcaggtgtttactgactcggagtaccagctcccgtacgtcctcggctcggcgcatcaaggatgcctcccgccgttcccagcagacgtcttcatggtgccacagtatggatacctcaccctgaacaacgggagtcaggcggtaggacgctcttcattttactgcctggagtactttccttctcagatgctgcgtaccggaaacaactttaccttcagctacacctttgaggacgttccttttcacagcagctacgctcacagccagagtttggaccgtctcatgaatcctctcatcgaccagtacctgtattacttgagcagaacaaacactccaagcggaaccactacgcagtccaggcttcagttttctcaagccggagcgagtgacattcgggaccagtctaggaactggcttcctggaccctgttaccgccagcagcgagtatcaaagacagctgcggacaacaacaacagtgattactcgtggactggagctaccaagtatcacctcaatggaagagactctctggtgaatccgggcacagccatggccagccacaaggacgatgaagaaaagtattttcctcagagcggggttctcatcttcggaaaacaagactcgggaaaaactaatgtggacattgaaaaggtcatgattacagacgaagaggaaatcaggaccaccaatcccgtggctacggagcagtatggttctgtatctaccaatctccagagcggcaacacacaagcagctacctcagatgtcaacacacaaggcgttcttccaggcatggtctggcaggacagagacgtgtacctgcagggacccatctgggcaaagattccacacacggacggacattttcacccttctcctcttatgggaggatttggactgaagcaccctcccccgcagattctcatcaagaataccccggtacctgcgaatccttctaccaccttcagcgcggcaaagtttgcttccttcatcacacagtactccacggggcaggtcagcgtggagatcgagtgggagctgcagaaagagaacagcaaacgctggaaccccgagatccagtatacctccaactacaacaagtctgttaatgtggactttactgtggacactaatggcgtgtattcagagcctcgccccattggcacaagatacctgactcgtaatctgtaa

SEQ ID NO: 1692 - DNA, 2208 bp, Artificial Sequence
  Synthetic Polynucleotide
atggctgccgatggttatcttccagattggctcgaggacactctctctgaaggaataagacagtggtggaagctcaaacctggcccaccaccgccaaagcccgcagagcggcataaggacgacagcaggggtcttgtgcttcctgggtacaagtacctcggacccttcaacggactcgacaaaggagagccggtcaacgaggcagacgccgcggccctcgagcacgacaaggcctacgaccggcagctcgacagcggagacaacccgtacctcaagtacaaccacgccgacgcggagtttcaggagcgccttaaagaagatacgtcttttgggggcaacctcgcaagagcagtattccaggcgaaaaagagggttcttgaacctctgggcctggttgaggagcctgttaagacggctccgggaaaaaagaggccggtagagcactctcctgcggagccagattcctcctccggaactggaaagtcgggccaacagcctgcaagaaagagattgaattttggtcagactggagacgcagactccgtacctgacccccagcctctcggacagccaccagcagccccctctggtctgggaactaatacgatggcttcaggcagtggcgcaccaatggcagacaataacgagggcgccgacggagtgggtaattcctcgggaaattggcattgcgattccacatggatgggcgacagagtcatcaccaccagcacccgcacctgggctctgcccacctacaacaaccatctgtacaagcaaatttccagccagtctggagccagcaacgacaaccactactttggctacagcaccccttgggggtattttgacttcaacagattccactgccacttctccccacgtgactggcaaagactcatcaacaacaattggggattccggcccaaaagactcaacttcaagctctttaacattcaagtcaaggaggtcacgcagaatgacggtacgacgacgattgccaataaccttaccagcacggttcaggtgtttactgactcggagtaccagctcccgtacgtcctcggctcggcgcatcaaggatgcctcccgccgttcccagcagacgtcttcatggtgccacagtatggatacctcaccctgaacaacgggagtcaggcggtaggacgctcttcattttactgcctggagtactttccttctcagatgctgcgtaccggaaacaactttaccttcagctacacctttgaggacgttccttttcacagcagctacgctcacagccagagtttggaccgtctcatgaatcctctcatcgaccagtacctgtattacttgagcagaacaaacactccaagcggaaccactacgcagtccaggcttcagttttctcaagccggagcgagtgacattcgggaccagtctaggaactggcttcctggaccctgttaccgccagcagcgagtatcaaagacagctgcggacaacaacaacagtgattactcgtggactggagctaccaagtatcacctcaatggaagagactctctggtgaatccgggcacagccatggccagccacaaggacgatgaagaaaagtattttcctcagagcggggttctcatcttccggaaacaagactcgggaaaaactaatgtggacattgaaaaggtcatgattacagacgaagaggaaatcaggaccaccaatcccgtggctacggagcagtatggttctgtatctaccaatctccagagcggcaacacacaagcagctacctcagatgtcaacacacaaggcgttcttccaggcatggtctggcaggacagagacgtgtacctgcagggacccatctgggcaaagattccacacacggacggacattttcacccttctcctcttatgggaggattgggacagaagcaccctcccccgcagagtctcatcaagaataccccggtacctgcgaatccttctaccaccttcagcgcggcaaagtttgcttccttcatcacacagtactccacggggcaggtcagcgtggagatcgagtgggagctgcagaaagagaacagcaaacgctggaaccccgagatccagtatacctccaactacaacaagtctgttaatgtggactttactgtggacactaatggcgtgtattcagagcctcgccccattggcacaagatacctgactcgtaatctgtaa

SEQ ID NO: 1693 - DNA, 2208 bp, Artificial Sequence
  Synthetic Polynucleotide
atggctgccgatggttatcttccagattggctcgaggacactctctctgaaggaataagacagtggtggaagctcaaacctggcccaccaccgccaaagcccgcagagcggcataaggacgacagcaggggtcttgtgcttcctgggtacaagtacctcggacccttcaacggactcgacaaaggagagccggtcaacgaggcagacgccgcggccctcgagcacgacaaggcctacgaccggcagctcgacagcggagacaacccgtacctcaagtacaaccacgccgacgcggagtttcaggagcgccttaaagaagatacgtcttttgggggcaacctcgcaagagcagtattccaggcgaaaaagagggttcttgaacctctgggcctggttgaggagcctgttaagacggctccgggaaaaaagaggccggtagagcactctcctgcggagccagattcctcctccggaactggaaagtcgggccaacagcctgcaagaaagagattgaattttggtcagactggagacgcagactccgtacctgacccccagcctctcggacagccaccagcagccccctctggtctgggaactaatacgatggcttcaggcagtggcgcaccaatggcagacaataacgagggcgccgacggagtgggtaattcctcgggaaattggcattgcgattccacatggatgggcgacagagtcatcaccaccagcacccgcacctgggctctgcccacctacaacaaccatctgtacaagcaaatttccagccagtctggagccagcaacgacaaccactactttggctacagcaccccttgggggtattttgacttcaacagattccactgccacttctccccacgtgactggcaaagactcatcaacaacaattggggattccggcccaaaagactcaacttcaagctctttaacattcaagtcaaggaggtcacgcagaatgacggtacgacgacgattgccaataaccttaccagcacggttcaggtgtttactgactcggagtaccagctcccgtacgtcctcggctcggcgcatcaaggatgcctcccgccgttcccagcagacgtcttcatggtgccacagtatggatacctcaccctgaacaacgggagtcaggcggtaggacgctcttcattttactgcctggagtactttccttctcagatgctgcgtaccggaaacaactttaccttcagctacacctttgaggacgttccttttcacagcagctacgctcacagccagagtttggaccgtctcatgaatcctctcatcgaccagtacctgtattacttgagcagaacaaacactccaagcggaaccactacgcagtccaggcttcagttttctcaagccggagcgagtgacattcgggaccagtctaggaactggcttcctggaccctgttaccgccagcagcgagtatcaaagacagctgcggacaacaacaacagtgattactcgtggactggagctaccaagtatcacctcaatggaagagactctctggtgaatccgggcacagccatggccagccacaaggacgatgaagaaaagtattttcctcagagcggggttctcatcttcggaaaacaagactcgggaaaaactaatgtggacattgaaaaggtcatgattacagacgaagaggaaatcaggaccaccaatcccgtggctacggagcagtatggttctgtatctaccaatctccagagcggcaacacacaagcagctacctcagatgtcaacacacaaggcgttcttccaggcatggtctggcaggacagagacgtgtacctgcagggacccatctgggcaaagattccacacacggacggacattttcacccttctcctcttatgggaggattgggacagaagcaccctcccccgcagattctcatcaagaataccccggtacctgcgaatccttctaccaccttcagcgcggcaaagtttgcttccttcatcacacagtactccacggggcaggtcagcgtggagatcgagtgggagctgcagaaagagaacagcaaacgctggaaccccgagatccagtatacctccaactacaacaagtctgttaatgtggactttactgtggacactaatggcgtgtattcagagcctcgccccattggcacaagatacctgactcgtaatctgtaa

SEQ ID NO: 1694 - DNA, 2208 bp, Artificial Sequence
  Synthetic Polynucleotide
atggctgccgatggttatcttccagattggctcgaggacactctctctgaaggaataagacagtggtggaagctcaaacctggcccaccaccgccaaagcccgcagagcggcataaggacgacagcaggggtcttgtgcttcctgggtacaagtacctcggacccttcaacggactcgacaaaggagagccggtcaacgaggcagacgccgcggccctcgagcacgacaaggcctacgaccggcagctcgacagcggagacaacccgtacctcaagtacaaccacgccgacgcggagtttcaggagcgccttaaagaagatacgtcttttgggggcaacctcgcaagagcagtattccaggcgaaaaagagggttcttgaacctctgggcctggttgaggagcctgttaagacggctccgggaaaaaagaggccggtagagcactctcctgcggagccagattcctcctccggaactggaaagtcgggccaacagcctgcaagaaagagattgaattttggtcagactggagacgcagactccgtacctgacccccagcctctcggacagccaccagcagccccctctggtctgggaactaatacgatggcttcaggcagtggcgcaccaatggcagacaataacgagggcgccgacggagtgggtaattcctcgggaaattggcattgcgattccacatggatgggcgacagagtcatcaccaccagcacccgcacctgggctctgcccacctacaacaaccatctgtacaagcaaatttccagccagtctggagccagcaacgacaaccactactttggctacagcaccccttgggggtattttgacttcaacagattccactgccacttctccccacgtgactggcaaagactcatcaacaacaattggggattccggcccaaaagactcaacttcaagctctttaacattcaagtcaaggaggtcacgcagaatgacggtacgacgacgattgccaataaccttaccagcacggttcaggtgtttactgactcggagtaccagctcccgtacgtcctcggctcggcgcatcaaggatgcctcccgccgttcccagcagacgtcttcatggtgccacggtatggatacctcaccctgaacaacgggagtcaggcggtaggacgctcttcattttactgcctggagtactttccttctcagatgctgcgtaccggaaacaactttaccttcagctacacctttgaggacgttccttttcacagcagctacgctcacagccagagtttggaccgtctcatgaatcctctcatcgaccagtacctgtattacttgagcagaacaaacactccaagcggaaccactacgcagtccaggcttcagttttctcaagccggagcgagtgacattcgggaccagtctaggaactggcttcctggaccctgttaccgccagcagcgagtatcaaagacagctgcggacaacaacaacagtgattactcgtggactggagctaccaagtatcacctcaatggaagagactctctggtgaatccgggcacagccatggccagccacaaggacgatgaagaaaagtattttcctcagagcggggttctcatcttccggaaacaagactcgggaaaaactaatgtggacattgaaaaggtcatgattacagacgaagaggaaatcaggaccaccaatcccgtggctacggagcagtatggttctgtatctaccaatctccagagcggcaacacacaagcagctacctcagatgtcaacacacaaggcgttcttccaggcatggtctggcaggacagagacgtgtacctgcagggacccatctgggcaaagattccacacacggacggacattttcacccttctcctcttatgggaggatttggactgaagcaccctcccccgcagattctcatcaagaataccccggtacctgcgaatccttctaccaccttcagcgcggcaaagtttgcttccttcatcacacagtactccacggggcaggtcagcgtggagatcgagtgggagctgcagaaagagaacagcaaacgctggaaccccgagatccagtatacctccaactacaacaagtctgttaatgtggactttactgtggacactaatggcgtgtattcagagcctcgccccattggcacaagatacctgactcgtaatctgtaa

SEQ ID NO: 1695 - DNA, 2208 bp, Artificial Sequence
  Synthetic Polynucleotide
atggctgccgatggttatcttccagattggctcgaggacactctctctgaaggaataagacagtggtggaagctcaaacctggcccaccaccgccaaagcccgcagagcggcataaggacgacagcaggggtcttgtgcttcctgggtacaagtacctcggacccttcaacggactcgacaaaggagagccggtcaacgaggcagacgccgcggccctcgagcacgacaaggcctacgaccggcagctcgacagcggagacaacccgtacctcaagtacaaccacgccgacgcggagtttcaggagcgccttaaagaagatacgtcttttgggggcaacctcgcaagagcagtattccaggcgaaaaagagggttcttgaacctctgggcctggttgaggagcctgttaagacggctccgggaaaaaagaggccggtagagcactctcctgcggagccagattcctcctccggaactggaaagtcgggccaacagcctgcaagaaagagattgaattttggtcagactggagacgcagactccgtacctgacccccagcctctcggacagccaccagcagccccctctggtctgggaactaatacgatggcttcaggcagtggcgcaccaatggcagacaataacgagggcgccgacggagtgggtaattcctcgggaaattggcattgcgattccacatggatgggcgacagagtcatcaccaccagcacccgcacctgggctctgcccacctacaacaaccatctgtacaagcaaatttccagccagtctggagccagcaacgacaaccactactttggctacagcaccccttgggggtattttgacttcaacagattccactgccacttctccccacgtgactggcaaagactcatcaacaacaattggggattccggcccaaaagactcaacttcaagctctttaacattcaagtcaaggaggtcacgcagaatgacggtacgacgacgattgccaataaccttaccagcacggttcaggtgtttactgactcggagtaccagctcccgtacgtcctcggctcggcgcatcaaggatgcctcccgccgttcccagcagacgtcttcatggtgccacagtatggatacctcaccctgaacaacgggagtcaggcggtaggacgctcttcattttactgcctggagtactttccttctcagatgctgcgtaccggaaacaactttaccttcagctacacctttgaggacgttccttttcacagcagctacgctcacagccagagtttggaccgtctcatgaatcctctcatcgaccagtacctgtattacttgagcagaacaaacactccaagcggaaccactacgcagtccaggcttcagttttctcaagccggagcgagtgacattcgggaccagtctaggaactggcttcctggaccctgttaccgccagcagcgagtatcaaagacagctgcggacaacaacaacagtgattactcgtggactggagctaccaagtatcacctcaatggaagagactctctggtgaatccgggcacagccatggccagccacaaggacgatgaagaaaagtattttcctcagagcggggttctcatcttccggaaacaagactcgggaaaaactaatgtggacattgaaaaggtcatgattacagacgaagaggaaatcaggaccaccaatcccgtggctacggagcagtatggttctgtatctaccaatctccagagcggcaacacacaagcagctacctcagatgtcaacacacaaggcgttcttccaggcatggtctggcaggacagagacgtgtacctgcagggacccatctgggcaaagattccacacacggacggacattttcacccttctcctcttatgggaggatttggactgaagcaccctcccccgcagattctcatcaagaataccccggtacctgcgaatccttctaccaccttcagcgcggcaaagtttgcttccttcatcacacagtactccacggggcaggtcagcgtggagatcgagtgggagctgcagaaagagaacagcaaacgctggaaccccgagatccagtatacctccaactacaacaagtctgttaatgtggactttactgtggacactaatggcgtgtattcagagcctcgccccattggcacaagatacctgactcgtaatctgtaa

SEQ ID NO: 1696 - DNA, 2208 bp, Artificial Sequence
  Synthetic Polynucleotide
atggctgccgatggttatcttccagattggctcgaggacactctctctgaaggaataagacagtggtggaagctcaaacctggcccaccaccgccaaagcccgcagagcggcataaggacgacagcaggggtcttgtgcttcctgggtacaagtacctcggacccttcaacggactcgacaaaggagagccggtcaacgaggcagacgccgcggccctcgagcacgacaaggcctacgaccggcagctcgacagcggagacaacccgtacctcaagtacaaccacgccgacgcggagtttcaggagcgccttaaagaagatacgtcttttgggggcaacctcgcaagagcagtattccaggcgaaaaagagggttcttgaacctctgggcctggttgaggagcctgttaagacggctccgggaaaaaagaggccggtagagcactctcctgcggagccagattcctcctccggaactggaaagtcgggccaacagcctgcaagaaagagattgaattttggtcagactggagacgcagactccgtacctgacccccagcctctcggacagccaccagcagccccctctggtctgggaactaatacgatggcttcaggcagtggcgcaccaatggcagacaataacgagggcgccgacggagtgggtaattcctcgggaaattggcattgcgattccacatggatgggcgacagagtcatcaccaccagcacccgcacctgggctctgcccacctacaacaaccatctgtacaagcaaatttccagccagtctggagccagcaacgacaaccactactttggctacagcaccccttgggggtattttgacttcaacagattccactgccacttctccccacgtgactggcaaagactcatcaacaacaattggggattccggcccaaaagactcaacttcaagctctttaacattcaagtcaaggaggtcacgcagaatgacggtacgacgacgattgccaataaccttaccagcacggttcaggtgtttactgactcggagtaccagctcccgtacgtcctcggctcggcgcatcaaggatgcctcccgccgttcccagcagacgtcttcatggtgccacggtatggatacctcaccctgaacaacgggagtcaggcggtaggacgctcttcattttactgcctggagtactttccttctcagatgctgcgtaccggaaacaactttaccttcagctacacctttgaggacgttccttttcacagcagctacgctcacagccagagtttggaccgtctcatgaatcctctcatcgaccagtacctgtattacttgagcagaacaaacactccaagcggaaccactacgcagtccaggcttcagttttctcaagccggagcgagtgacattcgggaccagtctaggaactggcttcctggaccctgttaccgccagcagcgagtatcaaagacagctgcggacaacaacaacagtgattactcgtggactggagctaccaagtatcacctcaatggaagagactctctggtgaatccgggcacagccatggccagccacaaggacgatgaagaaaagtattttcctcagagcggggttctcatcttcggaaaacaagactcgggaaaaactaatgtggacattgaaaaggtcatgattacagacgaagaggaaatcaggaccaccaatcccgtggctacggagcagtatggttctgtatctaccaatctccagagcggcaacacacaagcagctacctcagatgtcaacacacaaggcgttcttccaggcatggtctggcaggacagagacgtgtacctgcagggacccatctgggcaaagattccacacacggacggacattttcacccttctcctcttatgggaggatttggactgaagcaccctcccccgcagattctcatcaagaataccccggtacctgcgaatccttctaccaccttcagcgcggcaaagtttgcttccttcatcacacagtactccacggggcaggtcagcgtggagatcgagtgggagctgcagaaagagaacagcaaacgctggaaccccgagatccagtatacctccaactacaacaagtctgttaatgtggactttactgtggacactaatggcgtgtattcagagcctcgccccattggcacaagatacctgactcgtaatctgtaa

SEQ ID NO: 1697 - DNA, 2208 bp, Artificial Sequence
  Synthetic Polynucleotide
atggctgccgatggttatcttccagattggctcgaggacactctctctgaaggaataagacagtggtggaagctcaaacctggcccaccaccgccaaagcccgcagagcggcataaggacgacagcaggggtcttgtgcttcctgggtacaagtacctcggacccttcaacggactcgacaaaggagagccggtcaacgaggcagacgccgcggccctcgagcacgacaaggcctacgaccggcagctcgacagcggagacaacccgtacctcaagtacaaccacgccgacgcggagtttcaggagcgccttaaagaagatacgtcttttgggggcaacctcgcaagagcagtattccaggcgaaaaagagggttcttgaacctctgggcctggttgaggagcctgttaagacggctccgggaaaaaagaggccggtagagcactctcctgcggagccagattcctcctccggaactggaaagtcgggccaacagcctgcaagaaagagattgaattttggtcagactggagacgcagactccgtacctgacccccagcctctcggacagccaccagcagccccctctggtctgggaactaatacgatggcttcaggcagtggcgcaccaatggcagacaataacgagggcgccgacggagtgggtaattcctcgggaaattggcattgcgattccacatggatgggcgacagagtcatcaccaccagcacccgcacctgggctctgcccacctacaacaaccatctgtacaagcaaatttccagccagtctggagccagcaacgacaaccactactttggctacagcaccccttgggggtattttgacttcaacagattccactgccacttctccccacgtgactggcaaagactcatcaacaacaattggggattccggcccaaaagactcaacttcaagctctttaacattcaagtcaaggaggtcacgcagaatgacggtacgacgacgattgccaataaccttaccagcacggttcaggtgtttactgactcggagtaccagctcccgtacgtcctcggctcggcgcatcaaggatgcctcccgccgttcccagcagacgtcttcatggtgccacagtatggatacctcaccctgaacaacgggagtcaggcggtaggacgctcttcattttactgcctggagtactttccttctcagatgctgcgtaccggaaacaactttaccttcagctacacctttgaggacgttccttttcacagcagctacgctcacagccagagtttggaccgtctcatgaatcctctcatcgaccagtacctgtattacttgagcagaacaaacactccaagcggaaccactacgcagtccaggcttcagttttctcaagccggagcgagtgacattcgggaccagtctaggaactggcttcctggaccctgttaccgccagcagcgagtatcaaagacagctgcggacaacaacaacagtgattactcgtggactggagctaccaagtatcacctcaatggaagagactctctggtgaatccgggcacagccatggccagccacaaggacgatgaagaaaagtattttcctcagagcggggttctcatcttcggaaaacaagactcgggaaaaactaatgtggacattgaaaaggtcatgattacagacgaagaggaaatcaggaccaccaatcccgtggctacggagcagtatggttctgtatctaccaatctccagagcggcaacacacaagcagctacctcagatgtcaacacacaaggcgttcttccaggcatggtctggcaggacagagacgtgtacctgcagggacccatctgggcaaagattccacacacggacggacattttcacccttctcctcttatgggaggattgggacagaagcaccctcccccgcagagtctcatcaagaataccccggtacctgcgaatccttctaccaccttcagcgcggcaaagtttgcttccttcatcacacagtactccacggggcaggtcagcgtggagatcgagtgggagctgcagaaagagaacagcaaacgctggaaccccgagatccagtatacctccaactacaacaagtctgttaatgtggactttactgtggacactaatggcgtgtattcagagcctcgccccattggcacaagatacctgactcgtaatctgtaa

SEQ ID NO: 1698 - DNA, 2208 bp, Artificial Sequence
  Synthetic Polynucleotide
atggctgccgatggttatcttccagattggctcgaggacactctctctgaaggaataagacagtggtggaagctcaaacctggcccaccaccgccaaagcccgcagagcggcataaggacgacagcaggggtcttgtgcttcctgggtacaagtacctcggacccttcaacggactcgacaaaggagagccggtcaacgaggcagacgccgcggccctcgagcacgacaaggcctacgaccggcagctcgacagcggagacaacccgtacctcaagtacaaccacgccgacgcggagtttcaggagcgccttaaagaagatacgtcttttgggggcaacctcgcaagagcagtattccaggcgaaaaagagggttcttgaacctctgggcctggttgaggagcctgttaagacggctccgggaaaaaagaggccggtagagcactctcctgcggagccagattcctcctccggaactggaaagtcgggccaacagcctgcaagaaagagattgaattttggtcagactggagacgcagactccgtacctgacccccagcctctcggacagccaccagcagccccctctggtctgggaactaatacgatggcttcaggcagtggcgcaccaatggcagacaataacgagggcgccgacggagtgggtaattcctcgggaaattggcattgcgattccacatggatgggcgacagagtcatcaccaccagcacccgcacctgggctctgcccacctacaacaaccatctgtacaagcaaatttccagccagtctggagccagcaacgacaaccactactttggctacagcaccccttgggggtattttgacttcaacagattccactgccacttctccccacgtgactggcaaagactcatcaacaacaattggggattccggcccaaaagactcaacttcaagctctttaacattcaagtcaaggaggtcacgcagaatgacggtacgacgacgattgccaataaccttaccagcacggttcaggtgtttactgactcggagtaccagctcccgtacgtcctcggctcggcgcatcaaggatgcctcccgccgttcccagcagacgtcttcatggtgccacagtatggatacctcaccctgaacaacgggagtcaggcggtaggacgctcttcattttactgcctggagtactttccttctcagatgctgcgtaccggaaacaactttaccttcagctacacctttgaggacgttccttttcacagcagctacgctcacagccagagtttggaccgtctcatgaatcctctcatcgaccagtacctgtattacttgagcagaacaaacactccaagcggaaccactacgcagtccaggcttcagttttctcaagccggagcgagtgacattcgggaccagtctaggaactggcttcctggaccctgttaccgccagcagcgagtatcaaagacagctgcggacaacaacaacagtgattactcgtggactggagctaccaagtatcacctcaatggaagagactctctggtgaatccgggcacagccatggccagccacaaggacgatgaagaaaagtattttcctcagagcggggttctcatcttcggaaaacaagactcggagaaaactaatgtggacattgaaaaggtcatgattacagacgaagaggaaatcaggaccaccaatcccgtggctacggagcagtatggttctgtatctaccaatctccagagcggcaacacacaagcagctacctcagatgtcaacacacaaggcgttcttccaggcatggtctggcaggacagagacgtgtacctgcagggacccatctgggcaaagattccacacacggacggacattttcacccttctcctcttatgggaggatttggactgaagcaccctcccccgcagattctcatcaagaataccccggtacctgcgaatccttctaccaccttcagcgcggcaaagtttgcttccttcatcacacagtactccacggggcaggtcagcgtggagatcgagtgggagctgcagaaagagaacagcaaacgctggaaccccgagatccagtatacctccaactacaacaagtctgttaatgtggactttactgtggacactaatggcgtgtattcagagcctcgccccattggcacaagatacctgactcgtaatctgtaa

SEQ ID NO: 1699 - DNA, 2208 bp, Artificial Sequence
  Synthetic Polynucleotide
atggctgccgatggttatcttccagattggctcgaggacactctctctgaaggaataagacagtggtggaagctcaaacctggcccaccaccgccaaagcccgcagagcggcataaggacgacagcaggggtcttgtgcttcctgggtacaagtacctcggacccttcaacggactcgacaaaggagagccggtcaacgaggcagacgccgcggccctcgagcacgacaaggcctacgaccggcagctcgacagcggagacaacccgtacctcaagtacaaccacgccgacgcggagtttcaggagcgccttaaagaagatacgtcttttgggggcaacctcgcaagagcagtattccaggcgaaaaagagggttcttgaacctctgggcctggttgaggagcctgttaagacggctccgggaaaaaagaggccggtagagcactctcctgcggagccagattcctcctccggaactggaaagtcgggccaacagcctgcaagaaagagattgaattttggtcagactggagacgcagactccgtacctgacccccagcctctcggacagccaccagcagccccctctggtctgggaactaatacgatggcttcaggcagtggcgcaccaatggcagacaataacgagggcgccgacggagtgggtaattcctcgggaaattggcattgcgattccacatggatgggcgacagagtcatcaccaccagcacccgcacctgggctctgcccacctacaacaaccatctgtacaagcaaatttccagccagtctggagccagcaacgacaaccactactttggctacagcaccccttgggggtattttgacttcaacagattccactgccacttctccccacgtgactggcaaagactcatcaacaacaattggggattccggcccaaaagactcaacttcaagctctttaacattcaagtcaaggaggtcacgcagaatgacggtacgacgacgattgccaataaccttaccagcacggttcaggtgtttactgactcggagtaccagctcccgtacgtcctcggctcggcgcatcaaggatgcctcccgccgttcccagcagacgtcttcatggtgccacagtatggatacctcaccctgaacaacgggagtcaggcggtaggacgctcttcattttactgcctggagtactttccttctcagatgctgcgtaccggaaacaactttaccttcagctacacctttgaggacgttccttttcacagcagctacgctcacagccagagtttggaccgtctcatgaatcctctcatcgaccagtacctgtattacttgagcagaacaaacactccaagcggaaccactacgcagtccaggcttcagttttctcaagccggagcgagtgacattcgggaccagtctaggaactggcttcctggaccctgttaccgccagcagcgagtatcaaagacagctgcggacaacaacaacagtgattactcgtggactggagctaccaagtatcacctcaatggaagagactctctggtgaatccgggcacagccatggccagccacaaggacgatgaagaaaagtattttcctcagagcggggttctcatcttcggaaaacaagactcgggaaaaactaatgtggacattgaaaaggtcatgattacagacgaagaggaaatcaggaccaccaatcccgtggctacggagcagtatggttctgtatctaccaatctccagagcggcaacacacaagcagctacctcagatgtcaacacacaaggcgttcttccaggcatggtctggcaggacagagacgtgtacctgcagggacccatctgggcaaagattccacacacggacggacattttcacccttctcctcttatgggaggatttggacagaagcaccctcccccgcagagtctcatcaagaataccccggtacctgcgaatccttctaccaccttcagcgcggcaaagtttgcttccttcatcacacagtactccacggggcaggtcagcgtggagatcgagtgggagctgcagaaagagaacagcaaacgctggaaccccgagatccagtatacctccaactacaacaagtctgttaatgtggactttactgtggacactaatggcgtgtattcagagcctcgccccattggcacaagatacctgactcgtaatctgtaa

SEQ ID NO: 1700 - DNA, 2208 bp, Artificial Sequence
  Synthetic Polynucleotide
atggctgccgatggttatcttccagattggctcgaggacactctctctgaaggaataagacagtggtggaagctcaaacctggcccaccaccgccaaagcccgcagagcggcataaggacgacagcaggggtcttgtgcttcctgggtacaagtacctcggacccttcaacggactcgacaaaggagagccggtcaacgaggcagacgccgcggccctcgagcacgacaaggcctacgaccggcagctcgacagcggagacaacccgtacctcaagtacaaccacgccgacgcggagtttcaggagcgccttaaagaagatacgtcttttgggggcaacctcgcaagagcagtattccaggcgaaaaagagggttcttgaacctctgggcctggttgaggagcctgttaagacggctccgggaaaaaagaggccggtagagcactctcctgcggagccagattcctcctccggaactggaaagtcgggccaacagcctgcaagaaagagattgaattttggtcagactggagacgcagactccgtacctgacccccagcctctcggacagccaccagcagccccctctggtctgggaactaatacgatggcttcaggcagtggcgcaccaatggcagacaataacgagggcgccgacggagtgggtaattcctcgggaaattggcattgcgattccacatggatgggcgacagagtcatcaccaccagcacccgcacctgggctctgcccacctacaacaaccatctgtacaagcaaatttccagccagtctggagccagcaacgacaaccactactttggctacagcaccccttgggggtattttgacttcaacagattccactgccacttctccccacgtgactggcaaagactcatcaacaacaattggggattccggcccaaaagactcaacttcaagctctttaacattcaagtcaaggaggtcacgcagaatgacggtacgacgacgattgccaataaccttaccagcacggttcaggtgtttactgactcggagtaccagctcccgtacgtcctcggctcggcgcatcaaggatgcctcccgccgttcccagcagacgtcttcatggtgccacagtatggatacctcaccctgaacaacgggagtcaggcggtaggacgctcttcattttactgcctggagtactttccttctcagatgctgcgtaccggaaacaactttaccttcagccacacctttgaggacgttccttttcacagcagctacgctcacagccagagtttggaccgtctcatgaatcctctcatcgaccagtacctgtattacttgagcagaacaaacactccaagcggaaccactacgcagtccaggcttcagttttctcaagccggagcgagtgacattcgggaccagtctaggaactggcttcctggaccctgttaccgccagcagcgagtatcaaagacagctgcggacaacaacaacagtgattactcgtggactggagctaccaagtatcacctcaatggaagagactctctggtgaatccgggcacagccatggccagccacaaggacgatgaagaaaagtattttcctcagagcggggttctcatcttcggaaaacaagactcgggaaaaactaatgtggacattgaaaaggtcatgattacagacgaagaggaaatcaggaccaccaatcccgtggctacggagcagtatggttctgtatctaccaatctccagagcggcaacacacaagcagctacctcagatgtcaacacacaaggcgttcttccaggcatggtctggcaggacagagacgtgtacctgcagggacccatctgggcaaagattccacacacggacggacattttcacccttctcctcttatgggaggatttggactgaagcaccctcccccgcagattctcatcaagaataccccggtacctgcgaatccttctaccaccttcagcgcggcaaagtttgcttccttcatcacacagtactccacggggcaggtcagcgtggagatcgagtgggagctgcagaaagagaacagcaaacgctggaaccccgagatccagtatacctccaactacaacaagtctgttaatgtggactttactgtggacactaatggcgtgtattcagagcctcgccccattggcacaagatacctgactcgtaatctgtaa

SEQ ID NO: 1701 - DNA, 2208 bp, Artificial Sequence
  Synthetic Polynucleotide
atggctgccgatggttatcttccagattggctcgaggacactctctctgaaggaataagacagtggtggaagctcaaacctggcccaccaccgccaaagcccgcagagcggcataaggacgacagcaggggtcttgtgcttcctgggtacaagtacctcggacccttcaacggactcgacaaaggagagccggtcaacgaggcagacgccgcggccctcgagcacgacaaggcctacgaccggcagctcgacagcggagacaacccgtacctcaagtacaaccacgccgacgcggagtttcaggagcgccttaaagaagatacgtcttttgggggcaacctcgcaagagcagtattccaggcgaaaaagagggttcttgaacctctgggcctggttgaggagcctgttaagacggctccgggaaaaaagaggccggtagagcactctcctgcggagccagattcctcctccggaactggaaagtcgggccaacagcctgcaggaaagagattgaattttggtcggactggagacgcagactccgtacctgacccccagcctctcggacagccaccagcagccccctctggtctgggaactaatacgatggcttcaggcagtggcgcaccaatggcagacaataacgagggcgccgacggagtgggtaattcctcgggaaattggcattgcgattccacatggatgggcgacagagtcatcaccaccagcacccgcacctgggctctgcccacctacaacaaccatctgtacaagcaaatttccagccagtctggagccagcaacgacaaccactactttggctacagcaccccttgggggtattttgacttcaacagattccactgccacttctccccacgtgactggcaaagactcatcaacaacaattggggattccggcccaaaagactcaacttcaagctctttaacattcaagtcaaggaggtcacgcagaatgacggtacgacgacgattgccaataaccttaccagcacggttcaggtgtttactgactcggagtaccagctcccgtacgtcctcggctcggcgcatcaaggatgcctcccgccgttcccagcagacgtcttcatggtgccacagtatggatacctcaccctgaacaacgggagtcaggcggtaggacgctcttcattttactgcctggagtactttccttctcagatgctgcgtaccggaaacaactttaccttcagctacacctttgaggacgttccttttcacagcagctacgctcacagccagagtttggaccgtctcatgaatcctctcatcgaccagtacctgtattacttgagcagaacaaacactccaagcggaaccactacgcagtccaggcttcagttttctccagccggagcgagtgacattcgggaccagtctaggaactggcttcctggaccctgttaccgccagcagcgagtatcaaagacagctgcggacaacaacaacagtgattactcgtggactggagctaccaagtatcacctcaatggaagagactctctggtgaatccgggcacagccatggccagccacaaggacgatgaagaaaagtattttcctcagagcggggttctcatcttcggaaaacaagactcgggaaaaactaatgtggacattgaaaaggtcatgattacagacgaagaggaaatcaggaccaccaatcccgtggctacggagcagtatggttctgtatctaccaatctccagagcggcaacacacaagcagctacctcagatgtcaacacacaaggcgttcttccaggcatggtctggcaggacagagacgtgtacctgcagggacccatctgggcaaagattccacacacggacggacattttcacccttctcctcttatgggaggatttggactgaagcaccctcccccgcagattctcatcaagaataccccggtacctgcgaatccttctaccaccttcagcgcggcaaagtttgcttccttcatcacacagtactccacggggcaggtcagcgtggagatcgagtgggagctgcagaaagagaacagcaaacgctggaaccccgagatccagtatacctccaactacaacaagtctgttaatgtggactttactgtggacactaatggcgtgtattcagagcctcgccccattggcacaagatacctgactcgtaatctgtaa

SEQ ID NO: 1702 - DNA, 2205 bp, Artificial Sequence
  Synthetic Polynucleotide
atggctgccgatggttatcttccagattggctcgaggacactctctctgaaggaataagacagtggtggaagctcaaacctggcccaccaccgccaaagcccgcagagcggcataaggacgacagcaggggtcttgtgcttcctgggtacaagtacctcggacccttcaacggactcgacaaaggagagccggtcaacgaggcagacgccgcggccctcgagcacgacaaggcctacgaccggcagctcgacagcggagacaacccgtacctcaagtacaaccacgccgacgcggagtttcaggagcgccttaaagaagatacgtcttttgggggcaacctcgcaagagcagtattccaggcgaaaaagagggttcttgaacctctgggcctggttgaggagcctgttaagacggctccgggaaaaaagaggccggtagagcactctcctgcggagccagattcctcctccggaactggaaagtcgggccaacagcctgcaagaaagagattgaattttggtcagactggagacgcagactccgtacctgacccccagcctctcggacagccaccagcagccccctctggtctgggaactaatacgatggcttcaggcagtggcgcaccaatggcagacaataacgagggcgccgacggagtgggtaattcctcgggaaattggcattgcgattccacatggatgggcgacagagtcatcaccaccagcacccgcacctgggctctgcccacctacaacaaccatctgtacaagcaaatttccagccagtctggagccagcaacgacaaccactactttggctacagcaccccttgggggtattttgacttcaacagattccactgccacttctccccacgtgactggcaaagactcatcaacaacaattggggattccggcccaaaagactcaacttcaagctctttaacattcaagtcaaggaggtcacgcagaatgacggtacgacgacgattgccaataaccttaccagcacggttcaggtgtttactgactcggagtaccagctcccgtacgtcctcggctcggcgcatcaaggatgcctcccgccgttcccagcagacgtcttcatggtgccacagtatggatacctcaccctgaacaacgggagtcaggcggtaggacgctcttcattttactgcctggagtactttccttctcagatgctgcgtaccggaaacaactttaccttcagctacacctttgaggacgttccttttcacagcagctacgctcacagccagagtttggaccgtctcatgaatcctctcatcgaccagtacctgtattacttgagcagaacaaacactccaagcggaaccactacgcagtccaggcttcagttttctcaagccggagcgagtgacattcgggaccagtctaggaactggcttcctggaccctgttaccgccagcagcgagtatcaaagacagctgcggacaacaacagtgattactcgtggactggagctaccaagtatcacctcaatggaagagactctctggtgaatccgggcacagccatggccagccacaaggacgatgaagaaaagtattttcctcagagcggggttctcatcttcggaaaacaagactcgggaaaaactaatgtggacattgaaaaggtcatgattacagacgaagaggaaatcaggaccaccaatcccgtggctacggagcagtatggttctgtatctaccaatctccagagcggcaacacacaagcagctacctcagatgtcaacacacaaggcgttcttccaggcatggtctggcaggacagagacgtgtacctgcagggacccatctgggcaaagattccacacacggacggacattttcacccttctcctcttatgggaggatttggactgaagcaccctcccccgcagattctcatcaagaataccccggtacctgcgaatccttctaccaccttcagcgcggcaaagtttgcttccttcatcacacagtactccacggggcaggtcagcgtggagatcgagtgggagctgcagaaagagaacagcaaacgctggaaccccgagatccagtatacctccaactacaacaagtctgttaatgtggactttactgtggacactaatggcgtgtattcagagcctcgccccattggcacaagatacctgactcgtaatctgtaa

SEQ ID NO: 1703 - DNA, 2217 bp, Artificial Sequence
  Synthetic Polynucleotide
atggctgccgatggttatcttccagattggctcgaggacaacctctctgagggcattcgcgagtggtgggcgctgaaacctggagccccgaagcccaaagccaaccagcaaaagcaggacgacggccggggtctggtgcttcctggctacaagtacctcggacccttcaacggactcgacaagggggagcccgtcaacgcggcggacgcagcggccctcgagcacgacaaggcctacgaccagcagctgcaggcgggtgacaatccgtacctgcggtataaccacgccgacgccgagtttcaggagcgtctgcaagaagatacgtcttttgggggcaacctcgggcgagcagtcttccaggccaagaagcgggttctcgaacctctcggtctggttgaggaaggcgctaagacggctcctggaaagaagagaccggtagagccatcaccccagcgttctccagactcctctacgggcatcggcaagaaaggccaacagcccgccagaaaaagactcaattttggtcagactggcgactcagagtcagttccagaccctcaacctctcggagaacctccagcagcgccctctggtgtgggacctaatacaatggctgcaggcggtggcgcaccaatggcagacaataacgaaggcgccgacggagtgggtagttcctcgggaaattggcattgcgattccacatggctgggcgacagagtcatcaccgccagcacccgaacctgggccctgcccacctacaacaaccacctctacaagcaaatctccaacgggacatcggggggagccaccaacgacaacacctacttcggctacagcaccccctgggggtattttgactttaacagattccactgccacttttcaccacgtgactggcagcgactcatcaacaacaactggggattccggcccaagagactcagcttcaagctcttcaacatccaggtcaaggaggtcacgcagaatgaaggcaccaagaccatcgccaataacctcaccagcaccatccaggtgtttacggactcggagtaccagctgccgtacgttctcggctctgcccaccagggctgcctgcctccgttcccggcggacgtgttcacgattccccagtacggctacctaacactcaacaacggtagtcaggccgtgggacgctcctccttctactgcctggaatactttccttcgcagatgctgagaaccggcaacaacttccagtttacttacaccttcgaggacgtgcctttccacagcagctacgcccacagccagagcttggaccggctgatgaatcctctgattgaccagtacctgtactacttgtctcggactcaaacaacaggaggcacggcaaatacgcagactctgggcttcagccaaggtgggcctaatacaatggccaatcaggcaaagaactggctgccaggaccctgttaccgccaacaacgcgtctcaacgacaaccgggcaaaacaacaatagcaactttgcctggactgctgggaccaaataccatctgaatggaagaaattcattggctaatcctggcatcgctatggcaacacacaaagacgacgaggagcgtttttttcccagtaacgggatcctgatttttggcaaacaaaatgctgccagagacaatgcggattacagcgatgtcatgctcaccagcgaggaagaaatcaaaaccactaaccctgtggctacagaggaatacggtatcgtggcagataacttgcagcagcaaaacacggctcctcaaattggaactgtcaacagccagggggccttacccggtatggtctggcagaaccgggacgtgtacctgcagggtcccatctgggccaagattcctcacacggacggcaacttccacccgtctccgctgatgggcggctttggcctgaaacatcctccgcctcagatcctgatcaagaacacgcctgtacctgcggatcctccgaccaccttcaaccagtcaaagctgaactctttcatcacgcaatacagcaccggacaggtcagcgtggaaattgaatgggagctgcagaaggaaaacagcaagcgctggaaccccgagatccagtacacctccaactactacaaatctacaagtgtggactttgctgttaatacagaaggcgtgtactctgaaccccgccccattggcacccgttacctcacccgtaatctgtaa

SEQ ID NO: 1704 - DNA, 2217 bp, Artificial Sequence
  Synthetic Polynucleotide
atggctgccgatggttatcttccagattggctcgaggacaacctctctgagggcattcgcgagtggtgggcgctgaaacctggagccccgaagcccaaagccaaccagcaaaagcaggacgacggccggggtctggtgcttcctggctacaagtacctcggacccttcaacggactcgacaagggggggcccgtcaacgcggcggacgcagcggccctcgagcacgacaaggcctacgaccagcagctgcaggcgggtgacaatccgtacctgcggtataaccacgccgacgccgagtttcaggagcgtctgcaagaagatacgtcttttgggggcaacctcgggcgagcagtcttccaggccaagaagcgggttctcgaacctctcggtctggttgaggaaggcgctaagacggctcctggaaagaagagaccggtagagccatcaccccagcgttctccagactcctctacgggcatcggcaagaaaggccaacagcccgccagaaaaagactcaattttggtcagactggcgactcagagtcagttccagaccctcaacctctcggagaacctccagcagcgccctctggtgtgggacctaatacaatggctgcaggcggtggcgcaccaatggcagacaataacgaaggcgccgacggagtgggtagttcctcgggaaattggcattgcgattccacatggctgggcgacagagtcatcaccaccagcacccgaacctgggccctgcccacctacaacaaccacctctacaagcaaatctccaacgggacatcgggaggagccaccaacgacaacacctacttcggctacagcaccccctgggggtattttgactttaacagattccactgccacttttcaccacgtgactggcagcgactcatcaacaacaactggggattccggcccaagagactcagcttcaagctcttcaacatccaggtcaaggaggtcacgcagaatgaaggcaccaagaccatcgccaataacctcaccagcaccatccaggtgtttacggactcggagtaccagctgccgtacgttctcggctctgcccaccagggctgcctgcctccgttcccggcggacgtgttcatgattccccagtacggctacctaacactcaacaacggtagtcaggccgtgggacgctcctccttctactgcctggaatactttccttcgcagatgctgagaaccggcaacaacttccagtttacttacaccttcgaggacgtgcctttccacagcagctacgcccacagccagagcttggaccggctgatgaatcctctgattgaccagtacctgtactacttgtctcggactcaaacaacaggaggcacggcaaatacgcagactctgggcttcagccaaggtgggcctaatacaatggccaatcaggcaaagaactggctgccaggaccctgttaccgccaacaacgcgtctcaacgacaaccgggcaaaacaacaatagcaactttgcctggactgctgggaccaaataccatctgaatggaagaaattcattggctaatcctggcatcgctatggcaacacacaaagacgacgaggagcgtttttttcccagtaacgggatcctgatttttggcaaacaaaatgctgccagagacaatgcggattacagcgatgtcatgctcaccagcgaggaagaaatcaaaaccactaaccctgtggctacagaggaatacggtatcgtggcagataacttgcagcagcaaaacacggctcctcaaattggaactgtcaacagccagggggccttacccggtatggtctggcagaaccgggacgtgtacctgcagggtcccatctgggccaagattcctcacacggacggcaacttccacccgtctccgctgatgggcggctttggcctgaaacatcctccgcctcagatcctgatcaagaacacgcctgtacctgcggatcctccgaccaccttcaaccagtcaaagctgaactctttcatcacgcaatacagcaccggacaggtcagcgtggaaattgaatgggagctgcagaaggaaaacagcaagcgctggaaccccgagatccagtacacctccaactactacaaatctacaagtgtggactttgctgttaatacagaaggcgtgtactctgaaccccgccccattggcacccgttacctcacccgtaatctgtaa

SEQ ID NO: 1705 - DNA, 2217 bp, Artificial Sequence
  Synthetic Polynucleotide
atggctgccgatggttatcttccagattggctcgaggacaacctctctgagggcattcgcgagtggtgggcgctgaaacctggagccccgaagcccaaagccaaccagcaaaagcaggacgacggccggggtctggtgcttcctggctacaagtacctcggacccttcaacggactcgacaagggggagcccgtcaacgcggcggacgcagcggccctcgagcacgacaaggcctacgaccagcagctgcaggcgggtgacaatccgtacctgcggtataaccacgccgacgccgagtttcaggagcgtctgcaagaagatacgtcttttgggggcaacctcgggcgagcagtcttccaggccaagaagcgggttctcgaacctctcggtctggttgaggaaggcgctaagacggctcctggaaagaagagaccggtagagccatcaccccagcgttctccagactcctctacgggcatcggcaagaaaggccaacagcccgccagaaaaagactcaattttggtcagactggcgactcagagtcagttccagaccctcaacctctcggagaacctccagcagcgccctctggtgtgggacctaatacaatggctgcaggcggtggcgcaccaatggcagacaataacgaaggcgccgacggagtgggtagttcctcgggaaattggcattgcgattccacatggctgggcgacagagtcatcaccaccagcacccgaacctgggccctgcccacctacaacaaccacctctacaggcaaatctccaacgggacatcgggaggagccaccaacgacaacacctacttcggctacagcaccccctgggggtattttgactttaacagattccactgccacttttcaccacgtgactggcagcgactcatcaacaacaactggggattccggcccaagagactcagcttcaagctcttcaacatccaggtcaaggaggtcacgcagaatgaaggcaccaagaccatcgccaataacctcaccagcaccatccaggtgtttacggactcggagtaccagctgccgtacgttctcggctctgcccaccagggctgcctgcctccgttcccggcggacgtgttcatgattccccagtacggctacctaacactcaacaacggtagtcaggccgtgggacgctcctccttctactgcctggaatactttccttcgcagatgctgagaaccggcaacaacttccagtttacttacaccttcgaggacgtgcctttccacagcagctacgcccacagccagagcttggaccggctgatgaatcctctgattgaccagtacctgtactacttgtctcggactcaaacaacaggaggcacggcaaatacgcagactctgggcttcagccaaggtgggcctaatacaatggccaatcaggcaaagaactggctgccaggaccctgttaccgccaacaacgcgtctcaacgacaaccgggcaaaacaacaatagcaactttgcctggactgctgggaccaaataccatctgaatggaagaaattcattggctaatcctggcatcgctatggcaacacacaaagacgacgaggagcgtttttttcccagtaacgggatcctgatttttggcaaacaaaatgctgccagagacaatgcggattacagcgatgtcatgctcaccagcgaggaagaaatcaaaaccactaaccctgtggctacagaggaatacggtatcgtggcagataacttgcagcagcaaaacacggctcctcaaattggaactgtcaacagccagggggccttacccggtatggtctggcagaaccgggacgtgtacctgcagggtcccatctgggccaagattcctcacacggacggcaacttccacccgtctccgctgatgggcggctttggcctgaaacatcctccgcctcagatcctgatcaagaacacgcctgtacctgcggatcctccgaccaccttcaaccagtcaaagctgaactctttcatcacgcaatacagcaccggacaggtcagcgtggaaattgaatgggagctgcagaaggaaaacagcaagcgctggaaccccgagatccagtacacctccaactactacaaatctacaagtgtggactttgctgttaatacagaaggcgtgtactctgaaccccgccccattggcacccgttacctcacccgtaatctgtaa

SEQ ID NO: 1706 - DNA, 2217 bp, Artificial Sequence
  Synthetic Polynucleotide
atggctgccgatggttatcttccagattggctcgaggacaacctctctgagggcattcgcgagtggtgggcgctgaaacctggagccccgaagcccaaagccaaccagcaaaagcaggacgacggccggggtctggtgcttcctggctacaagtacctcggacccttcaacggactcgacaagggggagcccgtcaacgcggcggacgcagcggccctcgagcacgacaaggcctacgaccagcagctgcaggcgggtgacaatccgtacctgcggtataaccacgccgacgccgagttccaggagcgtctgcaagaagatacgtcttttgggggcaacctcgggcgagcagtcttccaggccaagaagcgggttctcgaacctctcggtctggttgaggaaggcgctaagacggctcctggaaagaagagaccggtagagccatcaccccagcgttctccagactcctctacgggcatcggcaagaaaggccaacagcccgccagaaaaagactcaattttggtcagactggcgactcagagtcagttccagaccctcaacctctcggagaacctccagcagcgccctctggtgtgggacctaatacaatggctgcaggcggtggcgcaccaatggcagacagtaacgaaggcgccgacggagtgggtagttcctcgggaaattggcattgcgattccacatggctgggcgacagagtcatcaccaccagcacccgaacctgggccctgcccacctacaacaaccacctctacaagcaaatctccaacgggacatcgggaggagccaccaacgacaacacctacttcggctacagcaccccctgggggtattttgactttaacagattccactgccacttttcaccacgtgactggcagcgactcatcaacaacaactggggattccggcccaagagactcagcttcaagctcttcaacatccaggtcaaggaggtcacgcagaatgaaggcaccaagaccatcgccaataacctcaccagcaccatccaggtgtttacggactcggagtaccagctgccgtacgttctcggctctgcccaccagggctgcctgcctccgttcccggcggacgtgttcatgattccccagtacggctacctaacactcaacaacggtagtcaggccgtgggacgctcctccttctactgcctggaatactttccttcgcagatgctgagaaccggcaacaacttccagtttacttacaccttcgaggacgtgcctttccacagcagctacgcccacagccagagcttggaccggctgatgaatcctctgattgaccagtacctgtactacttgtctcggactcaaacaacaggaggcacggcaaatacgcagactctgggcttcagccaaggtgggcctaatacaatggccaatcaggcaaagaactggctgccaggaccctgttaccgccaacaacgcgtctcaacgacaaccgggcaaaacaacaatagcaactttgcctggactgctgggaccaaataccatctgaatggaagaaattcattggctaatcctggcatcgctatggcaacacacaaagacgacgaggagcgtttttttcccagtaacgggatcctgatttttggcaaacaaaatgctgccagagacaatgcggattacagcgatgtcatgctcaccagcgaggaagaaatcaaaaccactaaccctgtggctacagaggaatacggtatcgtggcagataacttgcagcagcaaaacacggctcctcaaattggaactgtcaacagccagggggccttacccggtatggtctggcagaaccgggacgtgtacctgcagggtcccatctgggccaagattcctcacacggacggcaacttccacccgtctccgctgatgggcggctttggcctgaaacatcctccgcctcagatcctgatcaagaacacgcctgtacctgcggatcctccgaccaccttcaaccagtcaaagctgaactctttcatcacgcaatacagcaccggacaggtcagcgtggaaattgaatgggagctgcagaaggaaaacagcaagcgctggaaccccgagatccagtacacctccaactactacaaatctacaagtgtggactttgctgttaatacagaaggcgtgtactctgaaccccgccccattggcacccgttacctcacccgtaatctgtaa

SEQ ID NO: 1707 - DNA, 2217 bp, Artificial Sequence
  Synthetic Polynucleotide
atggctgccgatggttatcttccagattggctcgaggacaacctctctgagggcattcgcgagtggtgggcgctgaaacctggagccccgaagcccaaagccaaccagcaaaagcaggacgacggccggggtctggtgcttcctggctacaagtacctcggacccttcaacggactcgacaagggggagcccgtcaacgcggcggacgcagcggccctcgagcacgacaaggcctacgaccagcagctgcaggcgggtgacaatccgtacctgcggtataaccacgccgacgccgagtttcaggagcgtctgcaagaagatacgtcttttgggggcaacctcgggcgagcagtcttccaggccaagaagcgagttctcgaacctctcggtctggttgaggaaggcgctaagacggctcctggaaagaagagaccggtagagccatcaccccagcgttctccagactcctctacgggcatcggcaagaaaggccaacagcccgccagaaaaagactcaattttggtcagactggcgactcagagtcagttccagaccctcaacctctcggagaacctccagcagcgccctctggtgtgggacctaatacaatggctgcaggcggtggcgcaccaatggcagacaataacgaaggcgccgacggagtgggtagttcctcgggaaattggcattgcgattccacatggctgggcgacagagtcatcaccaccagcacccgaacctgggccctgcccacctacaacaaccacctctacaagcaaatctccaacgggacgtcgggaggagccaccaacgacaacacctacttcggctacagcaccccctgggggtattttgactttaacagattccactgccacttttcaccacgtgactggcagcgactcatcaacaacaactggggattccggcccaagagactcagcttcaagctcttcaacatccaggtcaaggaggtcacgcagaatgaaggcaccaagaccatcgccaataacctcaccagcaccatccaggtgtttacggactcggagtaccagctgccgtacgttctcggctctgcccaccagggctgcctgcctccgttcccggcggacgtgttcatgattccccagtacggctacctaacactcaacaacggtagtcaggccatgggacgctcctccttctactgcctggaatactttccttcgcagatgctgagaaccggcaacaacttccagtttacttacaccttcgaggacgtgcctttccacagcagctacgcccacagccagagcttggaccggctgatgaatcctctgattgaccagtacctgtactacttgtctcggactcaagcaacaggaggcacggcaaatacgcagactctgggcttcagccaaggtgggcctaatacaatggccaatcaggcaaagaactggctgccaggaccctgttaccgccaacaacgcgtctcaacgacaaccgggcaaaacaacaatagcaactttgcctggactgctgggaccaaataccatctgaatggaagaaattcattggctaatcctggcatcgctatggcaacacacaaagacgacgaggagcgtttttttcccagtaacgggatcctgatttttggcaaacaaaatgctgccagagacaatgcggattacagcgatgtcatgctcaccagcgaggaagaaatcaaaaccactaaccctgtggctacagaggaatacggtatcgtggcagataacttgcagcagcaaaacacggctcctcaaattggaactgtcaacagccagggggccttacccggtatggtctggcagaaccgggacgtgtacctgcagggtcccatctgggccaagattcctcacacggacggcaacttccacccgtctccgctgatgggcggctttggcctgaaacatcctccgcctcagatcctgatcaagaacacgcctgtacctgcggatcctccgaccaccttcaaccagtcaaagctgaactctttcatcacgcaatacagcaccggacaggtcagcgtggaaattgaatgggagctgcagaaggaaaacagcaagcgctggaaccccgagatccagtacacctccaactactacaaatctacaagtgtggactttgctgttaatacagaaggcgtgtactctgaaccccgccccattggcacccgttacctcacccgtaatctgtaa

SEQ ID NO: 1708 - DNA, 2217 bp, Artificial Sequence
  Synthetic Polynucleotide
atggctgccgatggttatcttccagattggctcgaggacaacctctctgagggcattcgcgagtggtgggcgctgaaacctggagccccgaagcccaaagccaaccagcaaaagcaggacgacggccggggtctggtgcttcctggctacaagtacctcggacccttcaacggactcgacaagggggagcccgtcaacgcggcggacgcagcggccctcgagcacgacaaggcctacgaccagcagctgcaggcgggtaacaatccgtacctgcggtataaccacgccgacgccgagtttcaggagcgtctgcaagaagatacgtcttttgggggcaacctcgggcgagcagtcttccaggccaagaagcgggttctcggacctctcggtctggttgaggaaggcgctaagacggctcctggaaagaagagaccggtagagccatcaccccagcgttctccagactcctctacgggcatcggcaagaaaggccaacagcccgccagaaaaagactcaattttggtcagactggcgactcagagtcagttccagaccctcaacctctcggagaacctccagcagcgccctctggtgtgggacctaatacaatggctgcaggcggtggcgcaccaatggcagacaataacgaaggcgccgacggagtgggtagttcctcgggaaattggcattgcgattccacatggctgggcgacagagtcatcaccaccagcacccgaacctgggccctgcccacctacaacaaccacctctacaagcaaatctccaacgggacatcgggaggagccaccaacgacaacacctacttcggctacagcaccccctgggggtattttgactttaacagattccactgccacttttcaccacgtgactggcagcgactcatcaacaacaactggggattccggcccaagagactcagcttcaagctcttcaacatccaggtcaaggaggtcacgcagaatgaaggcaccaagaccatcgccaataacctcaccagcaccatccaggtgtttacggactcggagtaccagctgccgtacgttctcggctctgcccaccagggctgcctgcctccgttcccggcggacgtgttcatgattccccagtacggctacctaacactcaacaacggtagtcgggccgtgggacgctcctccttctactgcctggaatactttccttcgcagatgctgagaaccggcaacaacttccagtttacttacaccttcgaggacgtgcctttccacagcagctacgcccacagccagagcttggaccggctgatgaatcctctgattgaccagtacctgtactacttgtctcggactcaaacaacaggaggcacggcaaatacgcagactctgggcttcagccaaggtgggcctaatacaatggccaatcaggcaaagaactggctgccaggaccctgttaccgccaacaacgcgtctcaacgacaaccgggcaaaacaacaatagcaactttgcctggactgctgggaccaaataccatctgaatggaagaaattcattggctaatcctggcatcgctatggcaacacacaaagacgacgaggagcgtttttttcccagtaacgggatcctgatttttggcaaacaaaatgctgccagagacaatgcggattacagcgatgtcatgctcaccagcgaggaagaaatcaaaaccactaaccctgtggctacagaggaatacggtatcgtggcagataacttgcagcagcaaaacacggctcctcaaattggaactgtcaacagccagggggccttacccggtatggtctggcagaaccgggacgtgtacctgcagggtcccatctgggccaagattcctcacacggacggcaacttccacccgtctccgctgatgggcggctttggcctgaaacatcctccgcctcagatcctgatcaagaacacgcctgtacctgcggatcctccgaccaccttcaaccagtcaaagctgaactctttcatcacgcaatacagcaccggacaggtcagcgtggaaattgaatgggagctgcagaaggaaaacagcaagcgctggaaccccgagatccagtacacctccaactactacaaatctacaagtgtggactttgctgttaatacagaaggcgtgtactctgaaccccgccccattggcacccgttacctcacccgtaatctgtaa

SEQ ID NO: 1709 - DNA, 2217 bp, Artificial Sequence
  Synthetic Polynucleotide
atggctgccgatggttatcttccagattggctcgaggacaacctctctgagggcattcgcgagtggtgggcgctgaaacctggagccccgaagcccaaagccaaccagcaaaagcaggacgacggccggggtctggtgcttcctggctacaagtacctcggacccttcaacggactcgacaagggggagcccgtcaacgcggcggacgcagcggccctcgagcacgacaaggcctacgaccagcagctgcaggcgggtgacaatccgtacctgcggtataaccacgccgacgccgagtttcaggagcgtctgcaagaagatacgtcttttgggggcaacctcgggcgagcagtcttccaggccaagaagcgggttctcgaacctctcggtctggttgaggaaggcgctaagacggctcctggaaagaagagaccggtagagccatcaccccagcgttctccagactcctctacgggcatcggcaagaaaggccaacagcccgccagaaaaagactcaattttggtcagactggcgactcagagtcagttccagaccctcaacctctcggagaacctccagcagcgccctctggtgtgggacctaatacaatggctgcaggcggtggcgcaccaatggcagacaataacgaaggcgccgacggagtgggtagttcctcgggaaattggcattgcgattccacatggctgggcgacagagtcatcaccaccagcacccgaacctgggccctgcccacctacaacaaccacctctacaagcaaatctccaacgggacatcgggaggagccaccaacgacaacacctacttcggctacagcaccccctgggggtattttgactttaacagattccactgccacttttcaccacgcgactggcagcgactcatcaacaacaactggggattccggcccaagagactcagcttcaagctcttcaacatccaggtcaaggaggtcacgcagaatgaaggcaccaagaccatcgccaataacctcaccagcaccatccaggtgtttacggactcggagtaccagctgccgtacgttctcggctctgcccaccagggctgcctgcctccgttcccggcggacgtgttcatgattccccagtacggctacctaacactcaacaacggtagtcaggccgtgggacgctcctccttctactgcctggaatactttccttcgcagatgctgagaaccggcaacaacttccagtttacttacaccttcgaggacgtgcctttccacagcagctacgcccacagccagagcttggaccggctgatgaatcctctgattgaccagtacctgtactacttgtctcggactcaaacaacaggaggcacggcaaatacgcagactctgggcttcagccaaggtgggcctaatacaatggccaatcaggcaaagaactggctgccaggaccctgttaccgccaacaacgcgtctcaacgacaaccgggcaaaacaacaatagcgactttgcctggactgctgggaccaaataccatctgaatggaagaaattcattggctaatcctggcatcgctatggcaacacacaaagacgacgaggagcgtttttttcccagtaacgggatcctgatttttggcaaacaaaatgctgccagagacaatgcggattacagcgatgtcatgctcaccagcgaggaagaaatcaaaaccactaaccctgtggctacagaggaatacggtatcgtggcagataacttgcagcagcaaaacacggctcctcaaattggaactgtcaacagccagggggccttacccggtatggtctggcagaaccgggacgtgtacctgcagggtcccgtctgggccaagattcctcacacggacggcaacttccacccgtctccgctgatgggcggctttggcctgaaacatcctccgcctcagatcctgatcaagaacacgcctgtacctgcggatcctccgaccaccttcaaccagtcaaagctgaactctttcatcacgcaatacagcaccggacaggtcagcgtggaaattgaatgggagctgcagaaggaaaacagcaagcgctggaaccccgagatccagtacacctccaactactacaaatctacaagtgtggactttgctgttaatacagaaggcgtgtactctgaaccccgccccattggcacccgttacctcacccgtaatctgtaa

SEQ ID NO: 1710 - DNA, 2217 bp, Artificial Sequence
  Synthetic Polynucleotide
atggctgccgatggttatcttccagattggctcgaggacaacctctctgagggcattcgcgagtggtgggcgctgaaacctggagccccgaagcccaaagccaaccagcaaaagcaggacgacggccggggtctggtgcttcctggctacaagtacctcggacccttcaacggactcgacaagggggagcccgtcaacgcggcggacgcagcggccctcgagcacgacaaggcctacgaccagcagctgcaggcgggtgacaatccgtacctgcggtataaccacgccgacgccgagtttcaggagcgtctgcaagaagatacgtcttttgggggcagcctcgggcgagcagtcttccaggccaagaagcgggttctcgaacctctcggtctggttgaggaaggcgctaagacggctcctggaaagaagagaccggtagagccatcaccccagcgttctccagactcctctacgggcatcggcaagaaaggccaacagcccgccagaaaaagactcaattttggtcagactggcgactcagagtcagttccagaccctcaacctctcggagaacctccagcagcgccctctggtgtgggacctaatacaatggctgcaggcggtggcgcaccaatggcagacaataacgaaggcgccgacggagtgggtagttcctcgggaaattggcattgcgattccacatggctgggcgacagagtcatcaccaccagcacccgaacctgggccctgcccacctacaacaaccacctctacaagcaaatctccaacgggacatcgggaggagccaccaacgacaacacctacttcggctacagcaccccctgggggtattttgactttaacagattccactgccacttttcaccacgtgactggcagcgactcatcaacaacaactggggattccggcccaagagactcagcttcaagctcttcaacatccaggtcaaggaggtcacgcagaatgaaggcaccaagaccatcgccaataacctcaccagcaccatccaggtgtttacggactcggagtaccagctgccgtacgttctcggctctgcccaccagggctgcctgcctccgttcccggcggacgtgttcatgattccccagtacggctacctaacactcaacaacggtagtcaggccgtgggacgctcctccttctactgcctggaatactttccttcgcagatgctgagaaccggcaacaacttccagtttacttacaccttcgaggacgtgcctttccacagcagctacgcccacagccagagcttggaccggctgatgaatcctctgattgaccagtacctgtactacttgtctcggactcaaacaacaggaggcacggcaaatacgcagaccctgggcttcagccaaggtgggcctaatacaatggccaatcaggcaaagaactggctgccaggaccctgttaccgccaacaacgcgtctcaacgacaaccgggcaaaacaacaatagcaactttgcctggactgctgggaccaaataccatctgaatggaagaaattcattggctaatcctggcatcgctatggcaacacacaaagacgacgaggagcgtttttttcccagtaacgggatcctgatttttggcaagcaaaatgctgccagagacaatgcggattacagcgatgtcatgctcaccagcgaggaagaaatcaaaaccactaaccctgtggctacagaggaatacggtatcgtggcagataacttgcagcagcaaaacacggctcctcaaattggaactgtcaacagccagggggccttacccggtatggtctggcagaaccgggacgtgtacctgcagggtcccatctgggccaagattcctcacacggacggcaacttccacccgtctccgctgatgggcggctttggcctaaaacatcctccgcctcagatcctgatcaagaacacgcctgtacctgcggatcctccgaccaccttcaaccagtcaaagctgaactctttcatcacgcaatacagcaccggacaggtcagcgtggaaattgaatgggagctgcagaaggaaaacagcaagcgctggaaccccgagatccagtacacctccaactactacaaatctacaagtgtggactttgctgttaatacagaaggcgtgtactctgaaccccgccccattggcacccgttacctcacccgtaatctgtaa

SEQ ID NO: 1711 - DNA, 2217 bp, Artificial Sequence
  Synthetic Polynucleotide
atggctgccgatggttatcttccagattggctcgaggacaacctctctgagggcattcgcgagtggtgggcgctgaaacctggagccccgaagcccaaagccaaccagcaaaagcaggacgacggccggggtctggtgcttcctggctacaagtacctcggacccttcaacggactcgacaagggggagcccgtcaacgcggcggacgcagcggccctcgagcacgacaaggcctacgaccagcagctgcaggcgggtgacaatccgtaccagcggtataaccacgccgacgccgagtttcaggagcgtctgcaagaagatacgtcttttgggggcaacctcgggcgagcagtcttccaggccaagaagcgggttctcgaacctctcggtctggttgaggaaggcgctaagacggctcctggaaagaagagaccggtagagccatcaccccagcgttctccagactcctctacgggcatcggcaagaaaggccaacagcccgccagaaaaagactcaattttggtcagactggcgactcagagtcagttccagaccctcaacctctcggagaacctccagcagcgccctctggtgtgggacctaatacaatggctgcaggcggtggcgcaccaatggcagacaataacgaaggcgccgacggagtgggtagttcctcgggaaattggcattgcgattccgcatggctgggcgacagagtcatcaccaccagcacccgaacctgggccctgcccacctacaacaaccacctctacaagcaaatctccaacgggacatcgggaggagccaccaacgacaacacctacttcggctacagcaccccctgggggtattttgactttaacagattccactgccacttttcaccacgtgactggcagcgactcatcaacaacaactggggattccggcccaagagactcagcttcaagctcttcaacatccaggtcaaggaggtcacgcagaatgaaggcaccaagaccatcgccaataacctcaccagcaccatccaggtgtttacggactcggagtaccagctgccgtacgttctcggctctgcccaccagggctgcctgcctccgttcccggcggacgtgttcacgattccccagtacggctacctaacactcaacaacggtagtcaggccgtgggacgctcctccttctactgcctggaatactttccttcgcagatgctgagaaccggcaacaacttccagtttacttacaccttcgaggacgtgcctttccacagcagctacgcccacagccagagcttggaccggctgatgaatcctctgattgaccagtacctgtactacttgtctcggactcaaacaacaggaggcacggcaaatacgcagactctgggcttcagccaaggtgggcctaatacaatggccaatcaggcaaagaactggctgccaggaccctgttaccgccaacaacgcgtctcaacgacaaccgggcaaaacaacaatagcaactttgcctggactgctgggaccaaataccatctgaatggaagaaattcattggctaatcctggcatcgctatggcaacacacaaagacgacgaggagcgtttttttcccagtaacgggatcctgatttttggcaaacaaaatgctgccagagacaatgcggattacagcgatgtcatgctcaccagcgaggaagaaatcaaaaccactaaccctgtggctacagaggaatacggtatcgtggcagataacttgcagcagcaaaacacggctcctcaaattggaactgtcaacagccagggggccttacccggtatggtctggcagaaccgggacgtgtacctgcagggtcccatctgggccaagattcctcacacggacggcaacttccacccgtctccgctgatgggcggctttggcctgaaacatcctccgcctcagatcctgatcaagaacacgcctgtacctgcggatcctccgaccaccttcaaccagtcaaagctgaactctttcatcacgcaatacagcaccggacaggtcagcgtggaaattgaatgggagctgcagaaggaaaacagcaagcgctggaaccccgagatccagtacacctccaactactacaaatctacaagtgtggactttgctgttaatacagaaggcgtgtactctgaaccccgccccattggcacccgttacctcacccgtaatctgtaa

SEQ ID NO: 1712 - DNA, 2217 bp, Artificial Sequence
  Synthetic Polynucleotide
atggctgccgatggttatcttccagattggctcgaggacaacctctctgagggcattcgcgagtggtgggcgctgaaacctggagccccgaagcccaaagccaaccagcaaaagcaggacgacggccggggtctggtgcttcctggctacaagtacctcggacccttcaacggactcgacaagggggagcccgtcaacgcggcggacacggcggccctcgagcacgacaaggcctacgaccagcagctgcaggcgggtgacaatccgtacctgcggtataaccacgccgacgccgagtttcaggagcgtctgcaagaagatacgtcttttgggggcaacctcgggcgagcagtcttccaggccaagaagcgggttctcgaacctctcggtctggttgaggaaggcgctaagacggctcctggaaagaagagaccggtagagccatcaccccagcgttctccagactcctctacgggcatcggcaagaaaggccaacagcccgccagaaaaagactcaattttggtcagactggcgactcagagtcagttccagaccctcaacctctcggagaacctccagcagcgccctctggtgtgggacctaatacaatggctgcaggcggtggcgcaccaatggcagacaataacgaaggcgccgacggagtgggtagttcctcgggaaattggcattgcgattccacatggctgggcgacagagtcatcaccaccagcacccgaacctgggccctgcccacctacaacaaccacctctacaagcaaatctccaacgggacatcgggaggagccaccaacgacaacacctacttcggctacagcaccccctgggggtattttgactttaacagattccactgccacttttcaccacgtgactggcagcgactcatcaacaacaactggggattccggcccaagagactcagcttcaagctcttcaacatccaggtcaaggaggtcacgcagaatgaaggcaccaagaccatcgccaataacctcaccagcaccatccaggtgtttacggactcggagtaccagctgccgtacgttctcggctctgcccaccagggctgcctgcctccgttcccggcggacgtgttcatgattccccagtacggctacctaacactcaacaacggtagtcaggccgtgggacgctcctccttctactgcctggaatactttccttcgcagatgctgagaaccggcaacaacttccagtttacttacaccttcgaggacgtgcctttccacagcagctacgcccacagccagagcttggaccggctgatgaatcctctgattgaccagtacctgtactacttgtctcggactcaaacaacaggaggcacggcaaatacgcagactctgggcttcagccaaggtgggcctaatacaatggccaatcaggcaaagaactggctgccaggaccctgttaccgccaacaacgcgtctcaacgacaaccgggcaaaacaacaatagcaactttgcctggactgctgggaccaaataccatctgaatggaagaaattcattggctaatcctggcatcgctatggcaacacacaaagacgacgaggagcgtttttttcccagtaacgggatcctgatttttggcaaacaaaatgctgccagagacaatgcggattacagcgatgtcatgctcaccagcgaggaagaaatcaaaaccactaaccctgtggctacagaggaatacggtatcgtggcagataacttgcagcagcaaaacacggctcctcaaattggaactgtcaacagccagggggccttacccggtatggtctggcagaaccgggacgtgtacctgcagggtcccatctgggccaagattcctcacacggacggcaacttccacccgtctccgctgatgggcggctttggcctgaaacatcctccgcctcagatcctgatcaagaacacgcctgtacctgcggatcctccgaccaccttcaaccagtcaaagctgaactctttcatcacgcaatacagcaccggacaggtcagcgtggaaattgaatgggagctgcagaaggaaaacagcaagcgctggaaccccgagatccagtacacctccaactactacaaatctacaagtgtggactttgctgttaatacagaaggcgtgtactctgaaccccgccccattggcacccgttacctcacccgtaatctgtaa

SEQ ID NO: 1713 - DNA, 2217 bp, Artificial Sequence
  Synthetic Polynucleotide
atggctgccgatggttatcttccagattggctcgaggacaacctctctgagggcattcgcgagtggtgggcgctgaaacctggagccccgaagcccaaagccaaccagcaaaagcaggacgacggccggggtctggtgcttcctggctacaagtacctcggacccttcaacggactcgacaagggggagcccgtcaacgcggcggacgcagcggccctcgagcacgacaaggcctacgaccagcagctgcaggcgggtgacaatccgtacctgcggtataaccacgccgacgccgagtttcaggagcgtctgcaagaagatacgtcttttgggggcaacctcgggcgagcagtcttccaggccaagaagcgggttctcgaacctctcggtctggttgaggaaggcgctaagacggctcctggaaagaagagaccggtagagccatcaccccagcgttctccagactcctctacgggcatcggcaagaaaggccaacagcccgccagaaaaagactcaattttggtcagactggcgactcagagtcagttccagaccctcaacctctcggagaacctccagcagcgccctctggtgtgggacctaatacaatggctgcaggcggtggcgcaccaatggcagacaataacgagggcgccgacggagtgggtagttcctcgggaaattggcattgcgattccacatggctgggcgacagagtcatcaccaccagcacccgaacctgggccctgcccacctacaacaaccacctctacaagcaaatctccaacgggacatcgggaggagccaccaacgacaacacctacttcggctacagcaccccctgggggtattttgactttaacagattccactgccacttttcaccacgtgactggcagcgactcatcaacaacaactggggattccggcccaagagactcagcttcaagctcttcaacatccaggtcaaggaggtcacgcagaatgaaggcaccaagaccatcgccaataacctcaccagcaccatccaggtgtttacggactcggagtaccagctgccgtacgttctcggctctgcccaccagggctgcctgcctccgttcccggcggacgtgttcatgattccccagtacggctacctgacactcaacaacggtagtcaggccgtgggacgctcctccttctactgcctggaatactttccttcgcagatgctgagaaccggcaacaacttccagtttacttacaccttcgaggacgtgcctttccacagcagctacgcccacagccagagcttggaccggctgatgaatcctctgattgaccagtacctgtactacttgtctcggactcaaacaacaggaggcacggcaaatacgcagactctgggcttcagccaaggtgggcctaatacaatggccaatcaggcaaagaactggctgccaggaccctgttaccgccaacaacgcgtctcaacgacaaccgggcaaaacaacaatagcaactttgcctggactgctgggaccaaataccatctgaatggaagaaattcattggctaatcctggcatcgctatggcaacacacaaagacgacgaggagcgtttttttcccagtaacgggatcctgatttttggcaaacaaaatgctgccagagacaatgcggattacagcgatgtcatgctcaccagcgaggaagaaatcaaaaccactaaccctgtggctacagaggaatacggtatcgtggcagataacttgcagcagcaaaacgcggctcctcaaattggaactgtcaacagccagggggccttacccggtatggtctggcagaaccgggacgtgtacctgcagggtcccatctgggccaagattcctcacacggacggcaacttccacccgtctccgctgatgggcggctttggcctgaaacatcctccgcctcagatcctgatcaagaacacgcctgtacctgcggatcccccgaccaccttcaaccagtcaaagctgaactctttcatcacgcaatacagcaccggacaggtcagcgtggaaattgaatgggagctgcagaaggaaaacagcaagcgctggaaccccgagatccagtacacctccaactactacaaatctacaagtgtggactttgctgttaatacagaaggcgtgtactctgaaccccgccccattggcacccgttacctcacccgtaatctgtaa

SEQ ID NO: 1714 - DNA, 2217 bp, Artificial Sequence
  Synthetic Polynucleotide
atggctgccgatggttatcttccagattggctcgaggacaacctctctgagggcattcgcgagtggtgggcgctgaaacctggagccccgaagcccaaagccaaccagcaaaagcaggacgacggccggggtctggtgcttcctggctacaagtacctcggacccttcaacggactcgacaagggggagcccgtcaacgcggcggacgcagcggccctcgagcacgacaaggcctacgaccagcagctgcaggcgggtgacaatccgtacctgcggtataaccacgccgacgccgagtttcaggagcgtctgcaagaagatacgtcttttgggggcaacctcgggcgagcagtcttccaggccaagaagcgggttctcgaacctctcggtctggttgaggaaggcgctaagacggctcctggaaagaagagaccggtagagccatcaccccagcgttctccagactcctctacgggcatcggcaagaaaggccaacagcccgccagaaaaagactcaattttggtcagactggcgactcagagtcagttccagaccctcaacctctcggagaacctccagcagcgccctctggtgtgggacctaatacaatggctgcaggcggtggcgcaccaatggcagacaataacgaaggcgccgacggagtgggtagttcctcgggaaattggcattgcgattccacatggctgggcgacagagtcatcaccaccagcacccgaacctgggccctgcccacctacaacaaccacctctacaagcaaatctccaacgggacatcgggaggagccaccaacgacaacacctacttcggctacagcaccccctgggggtattttgactttaacagattccactgccacttttcaccacgtgactggcagcgactcatcaacaacaactggggattccggcccaagagactcagcttcaagctcttcaacatccaggtcaaggaggtcacgcagaatgaaggcaccaagaccatcgccaataacctcaccagcaccatccaggtgtttacggactcggagtaccagctgccgtacgttctcggctctgcccaccagggctgcctgcctccgttcccggcggacgtgttcacgattccccagtacggctacctaacactcaacaacggtagtcaggccgtgggacgctcctccttctactgcctggaatactttccttcgcagatgctgagaaccggcaacaacttccagtttacttacaccttcgaggacgtgcctttccacagcagctacgcccacagccagagcttggaccggctgatgaatcctctgattgaccagtacctgtactacttgtctcggactcaaacaacaggaggcacggcaaatacgcagactctgggcttcagccaaggtgggcctaatacaatggccaatcaggcaaagaactggctgccaggaccctgttaccgccaacaacgcgtctcaacgacaaccgggcgaaacaacaatagcaactttgcctggactgctgggaccaaataccatctgaatggaagaaattcattggctaatcctggcatcgctatggcaacacacaaagacgacgaggagcgtttttttcccagtaacgggatcctgatttttggcaaacaaaatgctgccagagacaatgcggattacagcgatgtcatgctcaccagcgaggaagaaatcaaaaccactaaccctgtggctacagaggaatacggtatcgtggcagataacttgcagcagcaaaacacggctcctcaaattggaactgtcaacagccagggggccttacccggtatggtctggcagaaccgggacgtgtacctgcagggtcccatctgggccaagattcctcacacggacggcaacttccacccgtctccgctgatgggcggctttggcctgaaacatcctccgcctcagatcctgatcaagaacacgcctgtacctgcggatcctccgaccaccttcaaccagtcaaagctgaactctttcatcacgcaatacagcaccggacaggtcagcgtggaaattgaatgggagctgcagaaggaaaacagcaagcgctggaaccccgagatccagtacacctccaactactacaaatctacaagtgtggactttgctgttaatacagaaggcgtgtactctgaaccccgccccattggcacccgttacctcacccgtaatctgtaa

SEQ ID NO: 1715 - DNA, 2217 bp, Artificial Sequence
  Synthetic Polynucleotide
atggctgccgatggttatcttccagattggctcgaggacaacctctctgagggcattcgcgagtggtgggcgctgaaacctggagccccgaagcccaaagccaaccagcaaaagcaggacgacggccggggtctggtgcttcctggctacaagtacctcggacccttcaacggactcgacaagggggagcccgtcaacgcggcggacgcagcggccctcgagcacgacaaggcctacgaccagcagctgcaggcgggtgacaatccgtacctgcggtataaccacgccgacgccgagtttcaggagcgtctgcaagaagatacgtcttttgggggcaacctcgggcgagcggtcttccaggccaagaagcgggttctcgaacctctcggtctggttgaggaaggcgctaagacggctcctggaaagaagagaccggtagagccatcaccccagcgttctccagactcctctacgggcatcggcaagaaaggccaacagcccgccagaaaaagactcaattttggtcagactggcgactcagagtcagttccagaccctcaacctctcggagaacctccagcagcgccctctggtgtgggacctaatacaatggctgcaggcggtggcgcaccaatggcagacaataacgaaggcgccgacggagtgggtagttcctcgggaaattggcattgcgattccacatggctgggcgacagagtcatcaccaccagcacccgaacctgggccctgcccacctacaacaaccacctctacaagcaaatctccaacgggacatcggggggagccaccaacgacaacacctacttcggctacagcaccccctgggggtattttgactttaacagattccactgccacttttcaccacgtgactggcagcgactcatcaacaacaactggggattccggcccaagagactcagcttcaagctcttcaacatccaggtcaaggaggtcacgcagaatgaaggcaccaagaccatcgccaataacctcaccagcaccatccaggtgtttacggactcggagtaccagctgccgtacgttctcggctctgcccaccagggctgcctgcctccgttcccggcggacgtgttcacgattccccagtacggctacctaacactcaacaacggtagtcaggccgtgggacgctcctccttctactgcctggaatactttccttcgcagatgctgagaaccggcaacaacttccagtttacttacaccttcgaggacgtgcctttccacagcagctacgcccacagccagagcttggaccggctgatgaatcctctgattgaccagtacctgtactacttgtctcggactcaaacaacaggaggcacggcaaatacgcagactctgggcttcagccaaggtgggcctaatacaatggccaatcaggcaaagaactggctgccaggaccctgttaccgccaacaacgcgtctcaacgacaaccgggcaaaacaacaatagcaactttgcctggactgctgggaccaaataccatctgaatggaagaaattcattggctaatcctggcatcgctatggcaacacacaaagacgacgaggagcgtttttttcccagtaacgggatcctgatttttggcaaacaaaatgctgccagagacaatgcggattacagcgatgtcgtgctcaccagcgaggaagaaatcaaaaccactaaccctgtggctacagaggaatacggtatcgtggcagataacttgcagcagcaaaacacggctcctcaaattggaactgtcaacagccagggggccttacccggtatggtctggcagaaccgggacgtgtacctgcagggtcccatctgggccaagattcctcacacggacggcaacttccacccgtctccgctgatgggcggctttggcctgaaacatcctccgcctcagatcctgatcaagaacacgcctgtacctgcggatcctccgaccaccttcaaccagtcaaagctgaactctttcatcacgcaatacagcaccggacaggtcagcgtggaaattgaatgggagctgcagaaggaaaacagcaagcgctggaaccccgagatccagtacacctccaactactacaaatctacaagtgtggactttgctgttaatacagaaggcgtgtactctgaaccccgccccattggcacccgttacctcacccgtaatctgtaa

SEQ ID NO: 1716 - DNA, 2217 bp, Artificial Sequence
  Synthetic Polynucleotide
atggctgccgatggttatcttccagattggctcgaggacaacctctctgagggcattcgcgagtggtgggcactgaaacctggagccccgaagcccaaagccaaccagcaaaagcaggacgacggccggggtctggtgcttcctggctacaagtacctcggacccttcaacggactcgacaagggggagcccgtcaacgcggcggacgcagcggccctcgagcacgacaaggcctacgaccagcagctgcaggcgggtgacaatccgtacctgcggtataaccacgccgacgccgagtttcaggagcgtctgcaagaagatacgtcttttgggggcaacctcgggcgagcagtcttccaggccaagaagcgggttctcgaacctctcggtctggttgaggaaggcgctaagacggctcctggaaagaagagaccggtagagccatcaccccagcgttctccagactcctctacgggcatcggcaagaaaggccaacagcccgccagaaaaagactcaattttggtcagactggcgactcagagtcagttccagaccctcaacctctcggagaacctccagcagcgccctctggtgtgggacctaatacaatggctgcaggcggtggcgcaccaatggcagacaataacgaaggcgccgacggagtgggtagttcctcgggaaattggcattgcgattccacatggctgggcgacagagtcatcaccaccagcacccgaacctgggccctgcccacctacaacaaccacctctacaagcaaatctccaacgggacatcgggaggagccaccaacgacaacacctacttcggctacagcaccccctgggggtattttgactttaacagattccactgccacttttcaccacgtgactggcagcgactcatcaacaacaactggggattccggcccaagagactcagcttcaagctcttcaacatccaggtcaaggaggtcacgcagaatgaaggcaccaagaccatcgccaataacctcaccagcaccatccaggtgtttacggactcggagtaccagctgccgtacgttctcggctctgcccaccagggctgcctgcctccgttcccggcggacgtgttcatgattccccagtacggctacctaacactcaacaacggtagtcaggccgtgggacgctcctccttctactgcctggaatactttccttcgcagatgctgagagccggcaacaacttccagtttacttacaccttcgaggacgtgcctttccacagcagctacgcccacagccagagcttggaccggctgatgaatcctctgattgaccagtacctgtactacttgtctcggactcaaacaacaggaggcacggcaaatacgcagactctgggcttcagccaaggtgggcctaatacaatggccaatcaggcaaagaactggctgccaggaccctgttaccgccaacaacgcgtctcaacgacaaccgggcaaaacaacaatagcaactttgcctggactgctgggaccaaataccatctgaatggaagaaattcattggctaatcctggcatcgctatggcaacacacaaagacgacgaggagcgtttttttcccagtaacgggatcctgatttttggcaaacaaaatgctgccagagacaatgcggattacagcgatgtcatgctcaccagcgaggaagaaatcaaaaccactaaccctgtggctacagaggaatacggtatcgtggcagataacttgcagcagcaaaacacggctcctcaaattggaactgtcgacagccagggggccttacccggtatggtctggcagaaccgggacgtgtacctgcagggtcccatctgggccaagattcctcacacggacggcaacttccacccgtctccgctgatgggcggctttggcctgaaacatcctccgcctcagatcctgatcaagaacacgcctgtacctgcggatcctccgaccaccttcaaccagtcaaagctgaactctttcatcacgcaatacagcaccggacaggtcagcgtggaagttgaatgggagctgcagaaggaaaacagcaagcgctggaaccccgagatccagtacacctccaactactacaaatctacaagtgtggactttgctgttaatacagaaggcgtgtactctgaaccccgccccattggcacccgttacctcacccgtaatctgtaa

SEQ ID NO: 1717 - DNA, 2217 bp, Artificial Sequence
  Synthetic Polynucleotide
atggctgccgatggttatcttccagattggctcgaggacaacctctctgagggcattcgcgagtggtgggcgctgaaacctggagccccgaagcccaaagccaaccagcaaaagcaggacgacggccggggtctggtgcttcctggctacaagtacctcggacccttcaacggactcgacaagggggagcccgtcaacgcggcggacgcagcggccctcgagcacgacaaggcctacgaccagcagctgcaggcgggtgacaatccgtacctgcggtataaccacgccgacgccgagtttcaggagcgtctgcaagaagatacgtcttttgggggcagcctcgggcgagcagtcttccaggccaagaagcgggttctcgaacctctcggtctggttgaggaaggcgctaagacggctcctggaaagaagagaccggtagagccatcaccccagcgttctccagactcctctacgggcatcggcaagaaaggccaacagcccgccagaaaaagactcaattttggtcagactggcgactcagagtcagttccagaccctcaacctctcggagaacctccagcagcgccctctggtgtgggacctaatacaatggctgcaggcggtggcgcaccaatggcagacaataacgaaggcgccgacggagtgggtagttcctcgggaaattggcattgcgattccacatggctgggcgacagagtcatcaccaccagcacccgaacctgggccctgcccacctacaacaaccacctctacaagcaaatctccaacgggacatcgggaggagccaccaacgacaacacctacttcggctacagcaccccctgggggtattttgactttaacagattccactgccacttttcaccacgtgactggcagcgactcatcaacaacaactggggattccggcccaagagactcagcttcaagctcttcaacatccaggtcaaggaggtcacgcagaatgaaggcaccaagaccatcgccaataacctcaccagcaccatccaggtgtttacggactcggagtaccagctgccgtacgttctcggctctgcccaccagggctgcctgcctccgttcccggcggacgtgttcatgattccccagtacggctacctaacactcaacaacggtagtcaggccgtgggacgctcctccttctactgcctggaatactttccttcgcagatgctgagaaccggcaacaacttccagtttacttacaccttcgaggacgtgcctttccacagcagctacgcccacagccagagcttggaccggctgatgaatcctctgattgaccagtacctgtactacttgtctcggactcaaacaacaggaggcacggcaaatacgcagactctgggcttcagccaaggtgggcctaatacaatggccaatcaggcaaagaactggctgccaggaccctgttaccgccaacaacgcgtctcaacgacaaccgggcaaaacaacaatagcaactttgcctggactgctgggaccaaataccatctgaatggaagaaattcattggctaatcctggcatcgctatggcaacacacaaagacgacgaggagcgtttttttcccagtaacgggatcctgatttttggcaaacaaaatgctgccagagacaatgcggattacagcgatgtcatgctcaccagcgaggaagaaatcaaaaccactaaccctgtggctacagaggaatacggtatcgtggcagataacttgcagcagcaaaacacggctcctcaaattggaactgtcaacagccagggggccttacccggtatggtctggcagaaccgggacgtgtacctgcagggtcccatctgggccaagattcctcacacggacggcaacttccacccgtctccgctgatgggcggctttggcctgaaacatcctccgcctcagatcctgatcaagaacacgcctgtacctgcggatcctccgaccaccttcaaccagtcaaagctgaactctttcatcacgcaatacagcaccggacaggtcagcgtggaaattgaatgggagctgcagaaggaaaacagcaagcgctggaaccccgagatccagtacacctccaactactacaaatctacaagtgtggactttgctgttaatacagaaggcgtgtactctgaaccccgccccattggcacccgtcacctcacccgtaatctgtaa

SEQ ID NO: 1718 - DNA, 2217 bp, Artificial Sequence
  Synthetic Polynucleotide
atggctgccgatggttatcttccagattggctcgaggacaacctctctgagggcattcgcgagtggtgggcgctgaaacctggagccccgaagcccaaagccaaccagcaaaagcaggacgacggccggggtctggtgcttcctggctacaagtacctcggacccttcaacggactcgacaagggggagcccgtcaacgcggcggacgcagcggccctcgagcacgacaaggcctacgaccagcagctgcaggcgggtgacaatccgtacctgcggtataaccacgccgacgccgagtttcaggagcgtctgcaagaagatacgtcttttgggggcaacctcgggcgagcagtcttccaggccaagaagcgggttctcgaacctctcggtctggttgaggaaggcgctaagacggctcctggaaagaagagaccggtagagccatcaccccagcgttctccagactcctctacgggcatcggcaagaaaggccaacagcccgccagaaaaagactcaattttggtcagactggcgactcagagtcagttccagaccctcaacctctcggagaacctccagcagcgccctctggtgtgggacctaatacaatggctgcaggcggtggcgcaccaatggcagacaataacgaaggcgccgacggagtgggtagttcctcgggaaattggcattgcgattccacatggctgggcgacagagtcatcaccaccagcacccgaacctgggccctgcccacctacaacaaccacctctacaagcaaatctccaacgggacatcgggaggagccaccaacgacaacacctacttcggctacagcaccccctgggggtattttgactttaacagattccactgccacttttcaccacgtgactggcagcgactcatcaacaacaactggggattccggcccaagagactcagcttcaagctcttcaacatccaggtcaaggaggtcacgcagaatgaaggcaccaagaccatcgccaataacctcaccagcaccatccaggtgtttacggactcggagtaccagctgccgtacgttctcggctctgcccaccagggctgcctgcctccgttcccggcggacgtgttcacgattccccagtacggctacctaacactcaacaacggtagtcaggccgtgggacgctcctccttctactgcctggaatactttccttcgcagatgctgagaaccggcaacaacttccagtttacttacaccttcgaggacgtgcctttccacagcagctacgcccacagccagagcttggaccggctgatgaatcctctgattgaccagtacctgtactacttgtctcggactcaaacaacaggaggcacggcaaatacgcagactctgggcttcagccaaggtgggcctaatacaatggccaatcaggcaaagaactggctgccaggaccctgttaccgccaacaacgcgtctcaacgacaaccgggcaaaacaacaatagcaactttgcctggactgctgggaccaaataccatctgaatggaagaaattcattggctaatcctggcatcgctatggtaacacacaaagacgacgaggagcgtttttttcccagtaacgggatcctgatttttggcaaacaaaatgctgccagagacaatgcggattacagcgatgtcatgctcaccagcgaggaagaaatcaaaaccactaaccctgtggctacagaggaatacggtatcgtggcagataacttgcagcagcaaaacacggctcctcaaattggaactgtcaacagccagggggccttacccggtatggtctggcagaaccgggacgtgtacctgcagggtcccatctgggccaagattcctcacacggacggcaacttccacccgtctccgctgatgggcggctttggcctgaaacatcctccgcctcagatcctgatcaagaacacgcctgtacctgcggatcctccgaccaccttcaaccagtcaaagctgaactctttcatcacgcaatacagcaccggacaggtcagcgtggaaattgaatgggagctgcagaaggaaaacagcaagcgctggaaccccgagatccagtacacctccaactactacaaatctacaagtgtggactttgctgttaatacagaaggcgtgtactctgaaccccgccccattggcacccgttacctcacccgtaatctgtaa

SEQ ID NO: 1719 - DNA, 98 bp, Artificial Sequence
  Synthetic Polynucleotide
  misc_feature (58)..(63): n is a, c, g, or t
cttccgtgtcagctccgactagtcgctcgagatcagctgccatagctattccagtggnnnnnnaaatgaacatgtcgagcaggtacggctctcactag

SEQ ID NO: 1720 - DNA, 98 bp, Artificial Sequence
  Synthetic Polynucleotide
  misc_feature (58)..(63): n is a, c, g, or t
gaaggcacagtcgaggctgatcagcgagctctagtcgacggtatcgataaggtcaccnnnnnntttacttgtacagctcgtccatgccgagagtgatc

SEQ ID NO: 1721 - DNA, 42 bp, Artificial Sequence
  Synthetic Polynucleotide
  misc_feature (2)..(7): n is a, c, g, or t
gnnnnnnaaatgaacatgtcgagcaggtacggctctcactag

SEQ ID NO: 1722 - DNA, 47 bp, Artificial Sequence
  Synthetic Polynucleotide
  misc_feature (7)..(12): n is a, c, g, or t
gtcaccnnnnnntttacttgtacagctcgtccatgccgagagtgatc

SEQ ID NO: 1723 - DNA, 33 bp, Artificial Sequence
  Synthetic Polynucleotide
  misc_feature (6)..(11): n is a, c, g, or t
gtgacnnnnnngtcggactgtagaactctgaac

SEQ ID NO: 1724 - DNA, 32 bp, Artificial Sequence
  Synthetic Polynucleotide
  misc_feature (27)..(32): n is a, c, g, or t
acaggttcagagttctacagtccgacnnnnnn

SEQ ID NO: 1725 - DNA, 44 bp, Artificial Sequence
  Synthetic Polynucleotide
aatgatacggcgaccaccgacaggttcagagttctacagtccga

SEQ ID NO: 1726 - protein, 734 aa, Artificial Sequence
  Synthetic Polypeptide
MAADGYLPDWLEDTLSEGIRQWWKLKPGPPPPKPAERHKDDSRGLVLPGYKYLGPFNGLDKGEPVNEADAAALEHDKAYDRQLDSGDNPYLKYNHADAEFQERLKEDTSFGGNLGRAVFQAKKRVLEPLGLVEEPVKTAPGKKRPVEHSPVEPDSSSGTGKAGQQPARKRLNFGQTGDADSVPDPQPLGQPPAAPSGLGTNTMATGSGAPMADNNEGADGVGNSSGNWHCDSTWMGDRVITTSTRTWALPTYNNHLYKQISSQSGASNDNHYFGYSTPWGYFDFNRFHCHFSPRDWQRLINNNWGFRPKRLNFKLFNIQVKEVTQNDGTTTIANNLTSTVQVFTDSEYQLPYVLGSAHQGCLPPFPADVFMVPQYGYLTLNNGSQAVGRSSFYCLEYFPSQMLRTGNNFTFSYTFEDVPFHSSYAHSQSLDRLMNPLIDQYLYYLSRTHSNSGTHQQSRLQFSQAGASMSGPARNWLPGPCYRQQRVSKQSADNNNSEYSWTGATKYHLNGRDSLVNPGPAMASHKDDEEKFFLMSGVLIFGKQGSDENNVDIEKVMITDEEEIRTTNPVATEQYGSVSTNLQEAKTSPATADVNHQGVLPGMVWQDRDVYLQGPIWAKIPHTDGHFHPSPLMGGFGLKHPPPQILIKNTPVPANPSTTFSAAKFASFITQYSTGQASVEIEWELQKENSKRWNPEIQYTSNYNKSVNVDFTVDTNGVYSEPRPIGTRYLTRNL

SEQ ID NO: 1727 - protein, 734 aa, Artificial Sequence
  Synthetic Polypeptide
MAADGYLPDWLEDTLSEGIRQWWKLKPGPPPPKPAERHKDDSRGLVLPGYKYLGPFNGLDKGEPVNEADAAALEHDKAYDRQLDSGDNPYLKYNHADAEFQERLKEDTSFGGNLGRAVFQAKKRVLEPLGLVEEPVKTAPGKKRPVEHSPVEPDSSSGTGKAGQQPARKRLNFGQTGDADSVPDPQPLGQPPAAPTSLGSTTMATGSGAPMADNNEGADGVGNSSGNWHCDSQWLGDRVITTSTRTWALPTYNNHLYKQISSQSGASNDNHYFGHSTPWGYFDFNRFHCHFSPRDWQRLINNNWGFRPKRLNFKLFNIQVKEVTQNDGTTTIANNLTSTVQVFTDSEYQLPYVLGSAHQGCLPPFPADVFMVPQYGYLTLNNGSQAVGRSSFYCLEYFPSQMLRTGNNFTFSYTFEDVPFHSSYAHSQSLDRLMNPLIDQYLYYLSRTHSNSGTHQQSRLQFSQAGASMSGPARNWLPGPCYRQQRVSKQSADNNNSEYSWTGATKYRLNGRDSLVNPGSAMASHKDDEEKFFLMSGVLIFGKQGSDENNVDIEKVMITDEEEIRTTNPVATEQYGSVSTNLQEAKTSPATADVNHQGVLPGMVWQDRDVYLQGPIWAKIPHTDGHFHPSPLMGGFGLKHPPPQILIKNTPVPANPSTTFSAAKFASFITQYSTGQVSVEIEWELQKENSKRWNPEIQYTSNYNKSVNVDFTVDTNGVYSEPRPIGTRYLTRNL

SEQ ID NO: 1728 - protein, 734 aa, Artificial Sequence
  Synthetic Polypeptide
MAADGYLPDWLEDTLSEGIRQWWKLKPGPPPPKPAERHKDDSRGLVLPGYKYLGPFNGLDKGEPVNEADAAALEHDKAYDRQLDSGDNPYLKYNHADAEFQERLKEDTSFGGNLGRAVFQAKKRVLEPLGLVEEPVKTAPGKKRPVEHSPVEPDSSSGTGKAGQQPARKRLNFGQTGDADSVPDPQPLGQPPAAPSGLGTNTMATGSGAPMADNNEGADGVGNSSGNWHCDSTWMGDRVITTSTRTWALPTYNNHLYKQISSQSGASNDNHYFGYSTPWGYFDFNRFHCHFSPRDWQRLINNNWGFRPKRLNFKLFNIQVKEVTQNDGTTTIANNLTSTVQVFTDSEYQLPYVLGSAHQGCLPPFPADVFMVPQYGYLTLNNGSQAVGRSSFYCLEYFPSQMLRTGNNFTFSYTFEDVPFHSSYAHSQSLDRLMNPLIDQYLYYLSRTHSNSGTHQQSRLQFSQAGASMSGPARNWLPGPCYRQQRVSKQSADNNNSEYSWTGATKYRLNGRDSLVNPGSAMASHKDDEEKFFLMSGVLIFGKQGSDENNVDIEKVMITDEEEIRTTNPVATEQYGSVSTNLQEAKTSPATADVNHQGVLPGMVWQDRDVYLQGPIWAKIPHTDGHFHPSPLMGGFGLKHPPPQILIKNTPVPANPSTTFSAAKFASFITQYSTGQVSVEIEWELQKENSKRWNPEIQYTSNYNKSVNVDFTVDTNGVYSEPRPIGTRYLTRNL

SEQ ID NO: 1729 - protein, 734 aa, Artificial Sequence
  Synthetic Polypeptide
MAADGYLPDWLEDTLSEGIRQWWKLKPGPPPPKPAERHKDDSRGLVLPGYKYLGPFNGLDKGEPVNEADAAALEHDKAYDRQLDSGDNPYLKYNHADAEFQERLKEDTSFGGNLGRAVFQAKKRVLEPLGLVEEPVKTAPGKKRPVEHSPVEPDSSSGTGKAGQQPARKRLNFGQTGDADSVPDPQPLGQPPAAPTSLGSTTMATGSGAPMADNNEGADGVGNSSGNWHCDSQWLGDRVITTSTRTWALPTYNNHLYKQISSQSGASNDNHYFGHSTPWGYFDFNRFHCHFSPRDWQRLINNNWGFRPKRLNFKLFNIQVKEVTQNDGTTTIANNLTSTVQVFTDSEYQLPYVLGSAHQGCLPPFPADVFMVPQYGYLTLNNGSQAVGRSSFYCLEYFPSQMLRTGNNFTFSYTFEDVPFHSSYAHSQSLDRLMNPLIDQYLYYLSRTHSNSGTHQQSRLQFSQAGASMSGPARNWLPGPCYRQQRVSKQSADNNNSEYSWTGATKYHLNGRDSLVNPGPAMASHKDDEEKFFLMSGVLIFGKQGSDENNVDIEKVMITDEEEIRTTNPVATEQYGSVSTNLQEAKTSPATADVNHQGVLPGMVWQDRDVYLQGPIWAKIPHTDGHFHPSPLMGGFGLKHPPPQILIKNTPVPANPSTTFSAAKFASFITQYSTGQASVEIEWELQKENSKRWNPEIQYTSNYNKSVNVDFTVDTNGVYSEPRPIGTRYLTRNL

SEQ ID NO: 1730 - protein, 734 aa, Artificial Sequence
  Synthetic Polypeptide
MAADGYLPDWLEDTLSEGIRQWWKLKPGPPPPKPAERHKDDSRGLVLPGYKYLGPFNGLDKGEPVNEADAAALEHDKAYDRQLDSGDNPYLKYNHADAEFQERLKEDTSFGGNLGRAVFQAKKRVLEPLGLVEEPVKTAPGKKRPVEHSPVEPDSSSGTGKAGQQPARKRLNFGQTGDADSVPDPQPLGQPPAAPTSLGSTTMATGSGAPMADNNEGADGVGNSSGNWHCDSQWLGDRVITTSTRTWALPTYNNHLYKQISSQSGASNDNHYFGYSTPWGYFDFNRFHCHFSPRDWQRLINNNWGFRPKRLNFKLFNIQVKEVTQNDGTTTIANNLTSTVQVFTDSEYQLPYVLGSAHQGCLPPFPADVFMVPQYGYLTLNNGSQAVGRSSFYCLEYFPSQMLRTGNNFTFSYTFEDVPFHSSYAHSQSLDRLMNPLIDQYLYYLSRTHSNSGTHQQSRLQFSQAGASMSGPARNWLPGPCYRQQRVSKQSADNNNSEYSWTGATKYRLNGRDSLVNPGSAMASHKDDEEKFFLMSGVLIFGKQGSDENNVDIEKVMITDEEEIRTTNPVATEQYGSVSTNLQEAKTSPATADVNHQGVLPGMVWQDRDVYLQGPIWAKIPHTDGHFHPSPLMGGFGLKHPPPQILIKNTPVPANPSTTFSAAKFASFITQYSTGQVSVEIEWELQKENSKRWNPEIQYTSNYNKSVNVDFTVDTNGVYSEPRPIGTRYLTRNL

SEQ ID NO: 1731 - protein, 734 aa, Artificial Sequence
  Synthetic Polypeptide
MAADGYLPDWLEDTLSEGIRQWWKLKPGPPPPKPAERHKDDSRGLVLPGYKYLGPFNGLDKGEPVNEADAAALEHDKAYDRQLDSGDNPYLKYNHADAEFQERLKEDTSFGGNLGRAVFQAKKRVLEPLGLVEEPVKTAPGKKRPVEHSPVEPDSSSGTGKAGQQPARKRLNFGQTGDADSVPDPQPLGQPPAAPSGLGTNTMATGSGAPMADNNEGADGVGNSSGNWHCDSTWMGDRVITTSTRTWALPTYNNHLYKQISSQSGASNDNHYFGYSTPWGYFDFNRFHCHFSPRDWQRLINNNWGFRPKRLNFKLFNIQVKEVTQNDGTTTIANNLTSTVQVFTDSEYQLPYVLGSAHQGCLPPFPADVFMVPQYGYLTLNNGSQAVGRSSFYCLEYFPSQMLRTGNNFTFSYTFEDVPFHSSYAHSQSLDRLMNPLIDQYLYYLSRTHSNSGTHQQSRLQFSQAGASMSGPARNWLPGPCYRQQRVSKQSADNNNSEYSWTGATKYRLNGRDSLVNPGSAMASHKDDEEKFFLMSGVLIFGKQGSDENNVDIEKVMITDEEEIRTTNPVATEQYGSVSTNLQEAKTSPATADVNHQGVLPGMVWQDRDVYLQGPIWAKIPHTDGHFHPSPLMGGFGLKHPPPQILIKNTPVPANPSTTFSAAKFASFITQYSTGQASVEIEWELQKENSKRWNPEIQYTSNYNKSVNVDFTVDTNGVYSEPRPIGTRYLTRNL

SEQ ID NO: 1732 - protein, 734 aa, Artificial Sequence
  Synthetic Polypeptide
MAADGYLPDWLEDTLSEGIRQWWKLKPGPPPPKPAERHKDDSRGLVLPGYKYLGPFNGLDKGEPVNEADAAALEHDKAYDRQLDSGDNPYLKYNHADAEFQERLKEDTSFGGNLGRAVFQAKKRVLEPLGLVEEPVKTAPGKKRPVEHSPVEPDSSSGTGKAGQQPARKRLNFGQTGDADSVPDPQPLGQPPAAPTSLGSTTMATGSGAPMADNNEGADGVGNSSGNWHCDSTWMGDRVITTSTRTWALPTYNNHLYKQISSQSGASNDNHYFGYSTPWGYFDFNRFHCHFSPRDWQRLINNNWGFRPKRLNFKLFNIQVKEVTQNDGTTTIANNLTSTVQVFTDSEYQLPYVLGSAHQGCLPPFPADVFMVPQYGYLTLNNGSQAVGRSSFYCLEYFPSQMLRTGNNFTFSYTFEDVPFHSSYAHSQSLDRLMNPLIDQYLYYLSRTHSNSGTHQQSRLQFSQAGASMSGPARNWLPGPCYRQQRVSKQSADNNNSEYSWTGATKYRLNGRDSLVNPGSAMASHKDDEEKFFLMSGVLIFGKQGSDENNVDIEKVMITDEEEIRTTNPVATEQYGSVSTNLQEAKTSPATADVNHQGVLPGMVWQDRDVYLQGPIWAKIPHTDGHFHPSPLMGGFGLKHPPPQILIKNTPVPANPSTTFSAAKFASFITQYSTGQVSVEIEWELQKENSKRWNPEIQYTSNYNKSVNVDFTVDTNGVYSEPRPIGTRYLTRNL

SEQ ID NO: 1733 - protein, 734 aa, Artificial Sequence
  Synthetic Polypeptide
MAADGYLPDWLEDTLSEGIRQWWKLKPGPPPPKPAERHKDDSRGLVLPGYKYLGPFNGLDKGEPVNEADAAALEHDKAYDRQLDSGDNPYLKYNHADAEFQERLKEDTSFGGNLGRAVFQAKKRVLEPLGLVEEPVKTAPGKKRPVEHSPVEPDSSSGTGKAGQQPARKRLNFGQTGDADSVPDPQPLGQPPAAPSGLGTNTMATGSGAPMADNNEGADGVGNSSGNWHCDSTWMGDRVITTSTRTWALPTYNNHLYKQISSQSGASNDNHYFGYSTPWGYFDFNRFHCHFSPRDWQRLINNNWGFRPKRLNFKLFNIQVKEVTQNGGTTTIANNLTSTVQVFTDSEYQLPYVLGSAHQGCLPPFPADVFMVPQYGYLTLNNGSQAVGRSSFYCLEYFPSQMLRTGNNFTFSYTFEDVPFHSSYAHSQSLDRLMNPLIDQYLYYLSRTHSNSGTHQQSRLQFSQAGASMSGPARNWLPGPCYRQQRVSKQSADNNNSEYSWTGATKYRLNGRDSLVNPGSAMASHKDDEEKFFLMSGVLIFGKQGSDENNVDIEKVMITDEEEIRTTNPVATEQYGSVSTNLQEAKTSPATADVNHQGVLPGMVWQDRDVYLQGPIWAKIPHTDGHFHPSPLMGGFGLKHPPPQILIKNTPVPANPSTTFSAAKFASFITQYSTGQVSVEIEWELQKENSKRWNPEIQYTSNYNKSVNVDFTVDTNGVYSEPRPIGTRYLTRNL

SEQ ID NO: 1734 - protein, 735 aa, Artificial Sequence
  Synthetic Polypeptide
MAADGYLPDWLEDTLSEGIRQWWKLKPGPPPPKPAERHKDDSRGLVLPGYKYLGPFNGLDKGEPVNEADAAALEHDKAYDRQLDSGDNPYLKYNHADAEFQERLKEDTSFGGNLGRAVFQAKKRVLEPLGLVEEPVKTAPGKKRPVEHSPVEPDSSSGTGKAGQQPARKRLNFGQTGDADSVPDPQPLGQPPAAPSGLGTNTMATGSGAPMADNNEGADGVGNSSGNWHCDSTWMGDRVITTSTRTWALPTYNNHLYKQISSQSGASNDNHYFGYSTPWGYFDFNRFHCHFSPRDWQRLINNNWGFRPKRLNFKLFNIQVKEVTQNDGTTTIANNLTSTVQVFTDSEYQLPYVLGSAHQGCLPPFPADVFMVPQYGYLTLNNGSQAVGRSSFYCLEYFPSQMLRTGNNFTFSYTFEDVPFHSSYAHSQSLDRLMNPLIDQYLYYLSRTNTPSGTTTQSRLQFSQAGASDIRDQSRNWLPGPCYRQQRVSKTSADNNNSEYSWTGATKYHLNGRDSLVNPGPAMASHKDDEEKFFPQSGILIFGKQGSEKTNVDIEKVMITDEEEIRTTNPVATEQYGSVSTNLQRGNRQAATADVNTQGVLPGMVWQDRDVYLQGPIWAKIPHTDGHFHPSPLMGGFGLKHPPPQILIKNTPVPANPSTTFSAAKFASFITQYSTGQVSVEIEWELQKENSKRWNPEIQYTSNYNKSVNVDFTVDTNGVYSEPRPIGTRYLTRNL

SEQ ID NO: 1735 - protein, 735 aa, Artificial Sequence
  Synthetic Polypeptide
MAADGYLPDWLEDTLSEGIRQWWKLKPGPPPPKPAERHKDDSRGLVLPGYKYLGPFNGLDKGEPVNEADAAALEHDKAYDRQLDSGDNPYLKYNHADAEFQERLKEDTSFGGNLGRAVFQAKKRVLEPLGLVEEPVKTAPGKKRPVEHSPVEPDSSSGTGKAGQQPARKRLNFGQTGDADSVPDPQPLGQPPAAPSGLGTNTMATGSGAPMADNNEGADGVGNSSGNWHCDSTWMGDRVITTSTRTWALPTYNNHLYKQISSQSGASNDNHYFGYSTPWGYFDFNRFHCHFSPRDWQRLINNNWGFRPKRLNFKLFNIQVKEVTQNDGTTTIANNLTSTVQVFTDSEYQLPYVLGSAHQGCLPPFPADVFMVPQYGYLTLNNGSQAVGRSSFYCLEYFPSQMLRTGNNFTFSYTFEDVPFHSSYARSQSLDRLMNPLIDQYLYYLSRTNTPSGTTTQSRLQFSQAGASDIRDQSRNWLPGPCYRQQRVSKTSADNNNSEYSWTGATKYHLNGRDSLVNPGPAMASHKDDEEKFFPQSGVLIFGKQGSEKTNVDIEKVMITDEEEIRTTNPVATEQYGSVSTNLQRGNRQAATADVNTQGVLPGMVWQDRDVYLQGPIWAKIPHTDGHFHPSPLMGGFGLKHPPPQILIKNTPVPANPSTTFSAAKFASFITQYSTGQVSVEIEWELQKENSKRWNPEIQYTSNYNKSVNVDFTVDTNGVYSEPRPIGTRYLTRNL

SEQ ID NO: 1736 - protein, 735 aa, Artificial Sequence
  Synthetic Polypeptide
MAADGYLPDWLEDTLSEGIRQWWKLKPGPPPPKPAERHKDDSRGLVLPGYKYLGPFNGLDKGEPVNEADAAALEHDKAYDRQLDSGDNPYLKYNHADAEFQERLKEDTSFGGNLGRAVFQAKKRVLEPLGLVEEPVKTAPGKKRPVEHSPVEPDSSSGTGKAGQQPARKRLNFGQTGDADSVPDPQPLGQPPAAPSGLGTNTMATGSGAPMADNNEGADGVGNSSGNWHCDSTWMGDRVITTSTRTWALPTYNNHLYKQISSQSGASNDNHYFGYSTPWGYFDFNRFHCHFSPRDWQRLINNNWGFRPKRLNFKLFNIQVKEVTQNDGTTTIANNLTSTVQVFTDSEYQLPYVLGSAHQGCLPPFPADVFMVPQYGYLTLNNGSQAVGRSSFYCLEYFPSQMLRTGNNFTFSYTFEDVPFHSSYAHSQSLDRLMNPLIDQYLYYLSRTNTPSGTTTQSRLQFSQAGASDIRDQSRNWLPGPCYRQQRVSKTSADNNNSEYSWTGVTKYHLNGRDSLVNPGPAMASHKDDEEKFFPQSGVLIFGKQGSEKTNVDIEKVMITDEEEIRTTNPVATEQYGSVSTNLQRGNRQAATADVNTQGVLPGMVWQDRDVYLQGPIWAKIPHTDGHFHPSPLMGGFGLKHPPPQILIKNTPVPANPSTTFSAAKFASFITQYSTGQVSVEIEWELQKENSKRWNPEIQYTSNYNKSVNVDFTVDTNGVYSEPRPIGTRYLTRNL

SEQ ID NO: 1737 - protein, 735 aa, Artificial Sequence
  Synthetic Polypeptide
MAADGYLPDWLEDTLSEGIRQWWKLKPGPPPPKPAERHKDDSRGLVLPGYKYLGPFNGLDKGEPVNEADAAALEHDKAYDRQLDSGDNPYPKYNHADAEFQERLKEDTSFGGNLGRAVFQAKKRVLEPLGLVEEPVKTAPGKKRPVEHSPVEPDSSSGTGKAGQQPARKRLNFGQTGDADSVPDPQPLGQPPAAPSGLGTNTMATGSGAPMADNNEGADGVGNSSGNWHCDSTWMGDRVITTSTRTWALPTYNNHLYKQISSQSGASNDNHYFGYSTPWGYFDFNRFHCHFSPRDWQRLINNNWGFRPKRLNFKLFNIQVKEVTQNDGTTTIANNLTSTVQVFTDSEYQLPYVLGSAHQGCLPPFPADVFMVPQYGYLTLNNGSQAVGRSSFYCLEYFPSQMLRTGNNFTFSYTFEDVPFHSSYAHSQSLDRLMNPLIDQYLYYLSRTNTPSGTTTQSRLQFSQAGASDIRDQSRNWLPGPCYRQQRVSKTSADNNNSEYSWTGATKYHLNGRDSLVNPGPAMASHKDDEEKFFPQSGVLIFGKQGSEKTNVDIEKVMITDEEEIRTTNPVATEQYGSVSTNLQRGNRQAATADVNTQGVLPGMVWQDRDVYLQGPIWAKIPHTDGHFHPSPLMGGFGLKHPPPQILIKNTPVPANPSTTFSAAKFASFITQYSTGQVSVEIEWELQKENSKRWNPEIQYTSNYNKSVNVDFTVDTNGVYSEPRPIGTRYLTRNL

SEQ ID NO: 1738 - protein, 735 aa, Artificial Sequence
  Synthetic Polypeptide
MAADGYLPDWLEDTLSEGIRQWWKLKPGPPPPKPAERHKDDSRGLVLPGYKYLGPFNGLDKGEPVNEADAAALEHDKAYDRQLDSGDNPYLKYNHADAEFQERLKEDTSFGGNLGRAVFQAKKRVLEPLGLVEEPVKTAPGKKRPVEHSPVEPDSSSGTGKAGQQPARKRLNFGQTGDADSVPDPQPLGQPPAAPSGLGTNTMATGSGAPMADNNEGADGVGNSSGNWHCDSTWMGDRVITTSTRTWALPTYNNHLYKQISSQSGASNDNHYFGYSTPWGYFDFNRFHCHFSPRDWQRLINNNWGFRPKRLNFKLFNIQVKEVTQNDGTTTIANNLTSTVQVFTDSEYQLPYVLGSAHQGCLPPFPADVFMVPQYGYLTLNNGSQAVGRSSFYCLEYFPSQMLRTGNNFTFSYTFEDVPFHSSYAHSQSLDRLMNPLIDQYLYYLSRTNTPSGTTTQSRLQFSQAGASDIRDQSRNWLPGPCYRQQRVSKTSADNNNSEYSWTGATKYHLNGRDSLVNPGPAMASHKDDEEKFFPQSGVPIFGKQGSEKTNVDIEKVMITDEEEIRTTNPVATEQYGSVSTNLQRGNRQAATADVNTQGVLPGMVWQDRDVYLQGPIWAKIPHTDGHFHPSPLMGGFGLKHPPPQILIKNTPVPANPSTTFSAAKFASFITQYSTGQVSVEIEWELQKENSKRWNPEIQYTSNYNKSVNVDFTVDTNGVYSEPRPIGTRYLTRNL

SEQ ID NO: 1739 - protein, 735 aa, Artificial Sequence
  Synthetic Polypeptide
MAADGYLPDWLEDTLSEGIRQWWKLKPGPPPPKPAERHKDDSRGLVLPGYKYLGPFNGLDKGEPVNEADAAALEHDKAYDRQLDSGDNPYLKYNHADAEFQERLKEDTSFGGNLGRAVFQAKKRVLEPLGLVEEPVKTAPGKKRPVEHSPVEPDSSSGTGKAGQQPARKRLNFGQTGDADSVPDPQPLGQPPAAPSGLGTNTMATGSGAPMADNNEGADGVGNSSGNWHCDSTWMGDRVITTSTRTWALPTYNNHLYKQISSQSGASNDNHYFGYSTPWGYFDFNRFHCHFSPRDWQRLINNNWGFRPRRLNFKLFNIQVKEVTQNDGTTTIANNLTSTVQVFTDSEYQLPYVLGSAHQGCLPPFPADVFMVPQYGYLTLNNGSQAVGRSSFYCLEYFPSQMLRTGNNFTFSYTFEDVPFHSSYAHSQSLDRLMNPLIDQYLYYLSRTNTPSGTTTQSRLQFSQAGASDIRDQSRNWLPGPCYRQQRVSKTSADNNNSEYSWTGATKYHLNGRDSLVNPGPAMASHKDDEEKFFPQSGVLIFGKQGSEKTNVDIEKVMITDEEEIRTTNPVATEQYGSVSTNLQRGNRQAATADVNTQGVLPGMVWQDRDVYLQGPIWAKIPHTDGHFHPSPLMGGFGLKHPPPQILIKNTPVPANPSTTFSAAKFASFITQYSTGQVSVEIEWELQKENSKRWNPEIQYTSNYNKSVNVDFTVDTNGVYSEPRPIGTRYLTRNL

SEQ ID NO: 1740 - protein, 735 aa, Artificial Sequence
  Synthetic Polypeptide
MAADGYLPDWLEDTLSEGIRQWWKLKPGPPPPKPAERHKDDSRGLVLPGYKYLGPFNGLDKGEPVNEADAAALEHDKAYDRQLDSGDNPYLKYNHADAEFQERLKEDTSFGGNLGRAVFQAKKRVLEPLGLVEEPVKTAPGKKRPVEHSPVEPDSSSGTGKAGQQPARKRLNFGQTGDADSVPDPQPLGQPPAAPPGLGTNTMATGSGAPMADNNEGADGVGNSSGNWHCDSTWMGDRVITTSTRTWALPTYNNHLYKQISSQSGASNDNHYFGYSTPWGYFDFNRFHCHFSPRDWQRLINNNWGFRPKRLNFKLFNIQVKEVTQNDGTTTIANNLTSTVQVFTDSEYQLPYVLGSAHQGCLPPFPADVFMVPQYGYLTLNNGSQAVGRSSFYCLEYFPSQMLRTGNNFTFSYTFEDVPFHSSYAHSQSLDRLMNPLIDQYLYYLSRTNTPSGTTTQSRLQFSQAGASDIRDQSRNWLPGPCYRQQRVSKTSADNNNSEYSWTGATKYHLNGRDSLVNPGPAMASHKDDEEKFFPQSGVLIFGKQGSEKTNVDIEKVMITDEEEIRTTNPVATEQYGSVSTNLQRGNRQAATADVNTQGVLPGMVWQDRDVYLQGPIWAKIPHTDGHFHPSPLMGGFGLKHPPPQILIKNTPVPANPSTTFSAAKFASFITQYSTGQVSVEIEWELQKENSKRWNPEIQYTSNYNKSVNVDFTVDTNGVYSEPRPIGTRYLTRNL

SEQ ID NO: 1741 - protein, 735 aa, Artificial Sequence
  Synthetic Polypeptide
MAADGYLPDWLEDTLSEGIRQWWKLKPGPPPPKPAERHKDDSRGLVLPGYKYLGPFNGLDKGEPVNEADAAALEHDKAYDRQLDSGDNPYLKYNHADAEFQERLKEDTSFGGNLGRAVFQAKKRVLEPLGLVEEPVKTAPGKKRPVEHSPVEPDSSSGTGKAGQQPARKRLNFGQTGDADSVPDPQPLGQPPAAPSGLGTNTMATGSGAPMADNNEGADGVGNSSGNWHCDSTWMGDRVITTSTRTWALPTYNNHLYKQISSQSGASNDNHYFGYSTPWGYFDFNRFHCHFSPRDWQRLINNNWGFRPKRLNFKLFNIQVKEVTQNDGTTTIANNLTSTVQVFTDSEYQLPYVLGSAHQGCLPPFPADVFMVPQYGYLTLNNGSQAVGRSSFYCLEYFPSQMLRTGNNFTFSYTFEDVPFHSSYAHSQSLDRLMNPLIDQYLYYLSRTNTPSGTTTQSRLQFSQAGASDIRDQSRNWLPGPCYRQQRVSKTSADNNNSEYSWTGATKYHLNGRDSLVNPGPAMASHKDDEEKFFPQSGVLIFGKQGSEKTNVDIEKVMITDEEEIRTTNPVATEQYGSVSTNLQRGNRQAATADVNTQGVLPGMVWQDRDVYLQGPIWAKIPHTDGHFHPSPLMGGFGLKHPPPQILIKNTPVPANPSTTFSAAKFASFITQYSTGQVSVEIEWELQKENSKRWNPEIQCTSNYNKSVNVDFTVDTNGVYSEPRPIGTRYLTRNL

SEQ ID NO: 1742 - protein, 735 aa, Artificial Sequence
  Synthetic Polypeptide
MAADGYLPDWLEDTLSEGIRQWWKLKPGPPPPKPAERHKDDSRGLVLPGYKYLGPFNGLDKGEPVNEADAAALEHDKAYDRQLDSGDNPYLKYNHADAEFQERLKEDTSFGGNLGRAVFQAKKRVLEPLGLVEEPVKTAPGKKRPVEHSPVEPDSSSGTGKAGQQPARKRLNFGQTGDADSVPDPQPLGQPPAAPSGLGTNTMATGSGAPMADNNEGADGVGNSSGNWHCDSTWMGDRVITTSTRTWALPTYNNHLYKQISSQSGASNDNHYFGYSTPWGYFDFNRFHCHFSPRDWQRLINNNWGFRPKRLNFKLFNIQVKEVTQNDGTTTIANNLTSTVQVFTDSEYQLPYVLGSAHQGCLPPFPADVFMVPQYGYLTLNNGSQAVGRSSFYCLEYFPSQMLRTGNNFTFSYTFEDVPFHSSYAHSQSLDRLMNPLIDQYLYYLSRTNTPSGTTTQSRLQFSQAGASDIRDQSRNWLPGPCYRQQRVSKTSADNNNSEYSWTGATKYHLNGRDSLVNPGPAMASHKDDEEKFFPQSGVLIFGKQGSEKTNVDIEKVMITDEEEIRTTNPVATEQYGSVSTNLQRGNRQAATADVNTQGVLPGMVWQDRDVYLQGPIWAKIPHTDGHFHPSPLMGGFGLKHPPPQILIKNTPVPANPSTTFSAAKFASFITRYSTGQVSVEIEWELQKENSKRWNPEIQYTSNYNKSVNVDFTVDTNGVYSEPRPIGTRYLTRNL

SEQ ID NO: 1743 - protein, 735 aa, Artificial Sequence
  Synthetic Polypeptide
MAADGYLPDWLEDTLSEGIRQWWKLKPGPPPPKPAERHKDDSRGLVLPGYKYLGPFNGLDKGEPVNEADAAALEHDKAYDRQLDSGDNPYLKYNHADAEFRERLKEDTSFGGNLGRAVFQAKKRVLEPLGLVEEPVKTAPGKKRPVEHSPVEPDSSSGTGKAGQQPARKRLNFGQTGDADSVPDPQPLGQPPAAPSGLGTNTMATGSGAPMADNNEGADGVGNSSGNWHCDSTWMGDRVITTSTRTWALPTYNNHLYKQISSQSGASNDNHYFGYSTPWGYFDFNRFHCHFSPRDWQRLINNNWGFRPKRLNFKLFNIQVKEVTQNDGTTTIANNLTSTVQVFTDSEYQLPYVLGSAHQGCLPPFPADVFMVPQYGYLTLNNGSQAVGRSSFYCLEYFPSQMLRTGNNFTFSYTFEDVPFHSSYAHSQSLDRLMNPLIDQYLYYLSRTNTPSGTTTQSRLQFSQAGASDIRDQSRNWLPGPCYRQQRVSKTSADNNNSEYSWTGATKYHLNGRDSLVNPGPAMASHKDDEEKFFPQSGVLIFGKQGSEKTNVDIEKVMITDEEEIRTTNPVATEQYGSVSTNLQRGNRQAATADVNTQGVLPGMVWQDRDVYLQGPIWAKIPHTDGHFHPSPLMGGFGLKHPPPQILIKNTPVPANPSTTFSAAKFASFITQYSTGQVSVEIEWELQKENSKRWNPEIQYTSNYNKSVNVDFTVDTNGVYSEPRPIGTRYLTRNL

SEQ ID NO: 1744 - protein, 735 aa, Artificial Sequence
  Synthetic Polypeptide
MAADGYLPDWLEDTLSEGIRQWWKLKPGPPPPKPAERHKDDSRGLVLPGYKYLGPFNGLDKGEPVNEADAAALEHDKAYDRQLDSGDNPYLKHNHADAEFQERLKEDTSFGGNLGRAVFQAKKRVLEPLGLVEEPVKTAPGKKRPVEHSPVEPDSSSGTGKAGQQPARKRLNFGQTGDADSVPDPQPLGQPPAAPSGLGTNTMATGSGAPMADNNEGADGVGNSSGNWHCDSTWMGDRVITTSTRTWALPTYNNHLYKQISSQSGASNDNHYFGYSTPWGYFDFNRFHCHFSPRDWQRLINNNWGFRPKRLNFKLFNIQVKEVTQNDGTTTIANNLTSTVQVFTDSEYQLPYVLGSAHQGCLPPFPADVFMVPQYGYLTLNNGSQAVGRSSFYCLEYFPSQMLRTGNNFTFSYTFEDVPFHSSYAHSQSLDRLMNPLIDQYLYYLSRTNTPSGTTTQSRLQFSQAGASDIRDQSRNWLPGPCYRQQRVSKTSADNNNSEYSWTGATKYHLNGRDSLVNPGPAMASHKDDEEKFFPQSGVLIFGKQGSEKTNVDIEKVMITDEEEIRTTNPVATEQYGSVSTNLQRGNRQAATADVNTQGVLPGMVWQDRDVYLQGPIWAKIPHTDGHFHPSPLMGGFGLKHPPPQILIKNTPVPANPSTTFSAAKFASFITQYSTGQVSVEIEWELQKENSKRWNPEIQYTSNYNKSVNVDFTVDTNGVYSEPRPIGTRYLTRNL

SEQ ID NO: 1745 - protein, 735 aa, Artificial Sequence
  Synthetic Polypeptide
MAADGYLPDWLEDTLSEGIRQWWKLKPGPPPPKPAERHKDDSRGLVLPGYKYLGPFNGLDKGEPVNEADAAALEHDKAYDRQLDSGDNPYLKYNHADAEFQERLKEDTSFGGNLGRAVFQAKKRVLEPLGLVEEPVKTAPGKKRPVEHSPVEPDSSSGTGKAGQQPARKRLNFGQTGDADSVPDPQPLGQPPAAPSGLGTNTMATGSGAPMADNNEGADGVGNSSGNWHCDSTWMGDRVITTSTRTWALPTYNNHLYKQISSQSGASNDNHYFGYSTPWGYFDFNRFHCHFSPRDWQRLINNNWGFRPKRLNFKLFNIQVKEVTQNDGTTTIANNLTSTVQVFTDSEYQLPYVLGSAHQGCLPPFPADVFMVPQYGYLTLNNGSRAVGRSSFYCLEYFPSQMLRTGNNFTFSYTFEDVPFHSSYAHSQSLDRLMNPLIDQYLYYLSRTNTPSGTTTQSRLQFSQAGASDIRDQSRNWLPGPCYRQQRVSKTSADNNNSEYSWTGATKYHLNGRDSLVNPGPAMASHKDDEEKFFPQSGVLIFGKQGSEKTNVDIEKVMITDEEEIRTTNPVATEQYGSVSTNLQRGNRQAATADVNTQGVLPGMVWQDRDVYLQGPIWAKIPHTDGHFHPSPLMGGFGLKHPPPQILIKNTPVPANPSTTFSAAKFASFITQYSTGQVSVEIEWELQKENSKRWNPEIQYTSNYNKSVNVDFTVDTNGVYSEPRPIGTRYLTRNL

SEQ ID NO: 1746 - protein, 735 aa, Artificial Sequence
  Synthetic Polypeptide
MAADGYLPDWLEDTLSEGIRQWWKLKPGPPPPKPAERHKDDSRGLVLPGYKYLGPFNGLDKGEPVNEADAAALEHDKAYDRQLDSGDNPYLKYNHADAEFQERLKEDTSFGGNLGRAVFQAKKRVLEPLGLVEEPVKTAPGKKRPVEHSPVEPDSSSGTGKAGQQPARKRLNFGQTGDADSVPDPQPLGQPPAAPSGLGTNTMATGSGAPMADNNEGADGVGNSSGNWHCDSTWMGDRVITTSTRTWALPTYNNHLYKQISSQSGASNDNHYFGYSTPWGYFDFNRFHCHFSPRDWQRLINNNWGFRPKRLNFKLFNIQVKEVTQNDGTTTIANNLTSTVQVFTDSEYQLPYVLGSAHQGCLPPFPADVFMVPQYGYLTLNNGSQAVGRSSFYCLEYFPSQMLRTGNNFTFSYTFEDVPFHSSYAHSQSLDRLMNPLIDQYLYYLSRTNTPSGTTTQSRLQFSQAGASDIRDQSRNWLPGPCYRQQRVSKTSADNNNSEYSWTGATKYHLNGRDSLVNPGPAMASHKDDEEKFFPQSGVLIFGKQGSEKTNVDIEKVVITDEEEIRTTNPVATEQYGSVSTNLQRGNRQAATADVNTQGVLPGMVWQDRDVYLQGPIWAKIPHTDGHFHPSPLMGGFGLKHPPPQILIKNTPVPANPSTTFSAAKFASFITQYSTGQVSVEIEWELQKENSKRWNPEIQYTSNYNKSVNVDFTVDTNGVYSEPRPIGTRYLTRNL

SEQ ID NO: 1747 - protein, 735 aa, Artificial Sequence
  Synthetic Polypeptide
MAADGYLPDWLEDTLSEGIRQWWKLKPGPPPPKPAERHKDDSRGLVLPGYKYLGPFNGLDKGEPVNEADAAALEHDKAYDRQLDSGDNPYLKYNHADAEFQERLKEDTSFGGNLGRAVFQAKKRVLEPLGLVEEPVKTAPGKKRPVEHSPVEPDSSSGTGKAGQQPARKRLNFGQTGDADSVPDPQPLGQPPAAPSGLGTNTMATGSGAPMADNNEGADGVGNSSGNWHCDSTWMGDRVITTSTRTWALPTYNNHLYKQISSQSGASNDNHYFGYSTPWGYFDFNRFHCHFSPRDWQRLINNNWGFRPKRLNFKLFNIQVKEVTQNDGTTTIANNLTSTVQVFTDSEYQLPYVLGSAHQGCLPPFPADVFMVPQYGYLTLNNGSQAVGRSSFYCLEYFPSQMLRTGNNFTFSHTFEDVPFHSSYAHSQSLDRLMNPLIDQYLYYLSRTNTPSGTTTQSRLQFSQAGASDIRDQSRNWLPGPCYRQQRVSKTSADNNNSEYSWTGATKYHLNGRDSLVNPGPAMASHKDDEEKFFPQSGVLIFGKQGSEKTNVDIEKVMITDEEEIRTTNPVATEQYGSVSTNLQRGNRQAATADVNTQGVLPGMVWQDRDVYLQGPIWAKIPHTDGHFHPSPLMGGFGLKHPPPQILIKNTPVPANPSTTFSAAKFASFITQYSTGQVSVEIEWELQKENSKRWNPEIQYTSNYNKSVNVDFTVDTNGVYSEPRPIGTRYLTRNL

SEQ ID NO: 1748 - protein, 735 aa, Artificial Sequence
  Synthetic Polypeptide
MAADGYLPDWLEDTLSEGIRQWWKLKPGPPPPKPAERHKDDSRGLVLPGYKYLGPFNGLDKGEPVNEADAAALEHDKAYDRQLDSGDNPYLKYNHADAEFQERLKEDTSFGGNLGRAVFQAKKRVLEPLGLVEEPVKTAPGKKRPVEHSPVEPDSSSGTGKAGQQPARKRLNFGQTGDADSVPDPQPLGQPPAAPSGLGTNTMATGSGAPMADNNEGADGVGNSSGNWHCDSTWMGGRVITTSTRTWALPTYNNHLYKQISSQSGASNDNHYFGYSTPWGYFDFNRFHCHFSPRDWQRLINNNWGFRPKRLNFKLFNIQVKEVTQNDGTTTIANNLTSTVQVFTDSEYQLPYVLGSAHQGCLPPFPADVFMVPQYGYLTLNNGSQAVGRSSFYCLEYFPSQMLRTGNNFTFSYTFEDVPFHSSYAHSQSLDRLMNPLIDQYLYYLSRTNTPSGTTTQSRLQFSQAGASDIRDQSRNWLPGPCYRQQRVSKTSADNNNSEYSWTGATKYHLNGRDSLVNPGPAMASHKDDEEKFFPQSGVLIFGKQGSEKTNVDIEKVMITDEEEIRTTNPVATEQYGSVSTNLQRGNRQAATADVNTQGVLPGMVWQDRDVYLQGPIWAKIPHTDGHFHPSPLMGGFGLKHPPPQILIKNTPVPANPSTTFSAAKFASFITQYSTGQVSVEIEWELQKENSKRWNPEIQYTSNYNKSVNVDFTVDTNGVYSEPRPIGTRYLTRNL

SEQ ID NO: 1749 - protein, 735 aa, Artificial Sequence
  Synthetic Polypeptide
MAADGYLPDWLEDTLSEGIRQWWKLKPGPPPPKPAERHKDDSRGLVLPGYKYLGPFNGLDKGEPVNEADAAALEHDKAYDRQLDSGDNPYLKYNHADAEFQERLKEDTSFGGNLGRAVFQAKKRVLEPLGLVEEPVKTAPGKKRPVEHSPVEPDSSSGTGKAGQQPARKRLNFGQTGDADSVPDPQPLGQPPAAPSGLGTNTMATGSGAPMADNNEGADGVGNSSGNWHCDSTWMGDRVITTSTRTWALPTYNNHLYKQISSQSGASNDNHYFGYSTPWGYFDFNRFHCHFSPRDWQRLINNNWGFRPKRPNFKLFNIQVKEVTQNDGTTTIANNLTSTVQVFTDSEYQLPYVLGSAHQGCLPPFPADVFMVPQYGYLTLNNGSQAVGRSSFYCLEYFPSQMLRTGNNFTFSYTFEDVPFHSSYAHSQSLDRLMNPLIDQYLYYLSRTNTPSGTTTQSRLQFSQAGASDIRDQSRNWLPGPCYRQQRVSKTSADNNNSEYSWTGATKYHLNGRDSLVNPGPAMASHKDDEEKFFPQSGVLIFGKQGSEKTNVDIEKVMTTDEEEIRTTNPVATEQYGSVSTNLQRGNRQAATADVNTQGVLPGMVWQDRDVYLQGPIWAKIPHTDGHFHPSPLMGGFGLKHPPPQILIKNTPVPANPSTTFSAAKFASFITQYSTGQVSVEIEWELQKENSKRWNPEIQYTSNYNKSVNVDFTVDTNGVYSEPRPIGTRYLTRNL

SEQ ID NO: 1750 - protein, 735 aa, Artificial Sequence
  Synthetic Polypeptide
MAADGYLPDWLEDTLSEGIRQWWKLKPGPPPPKPAERHKDDSRGLVLPGYKYLGPFNGLDKGEPVNEADAAALEHDKAYDRQLDSGDNPYLKYNHADAEFRERLKEDTSFGGNLGRAVFQAKKRVLEPLGLVEEPVKTAPGKKRPVEHSPVEPDSSSGTGKAGQQPARKRLNFGQTGDADSVPDPQPLGQPPAAPSGLGTNTMATGSGAPMADNNEGADGVGNSSGNWHCDSTWMGDRVITTSTRTWALPTYNNHLYKQISSQSGASNDNHYFGYSTPWGYFDFNRFHCHFSPRDWQRLINNNWGFRPKRLNFKLFNIQVKEVTQNDGTTTIANNLTSTVQVFTDSEYQLPYVLGSAHQGCLPPFPADVFMVPQYGYLTLNNGSQAVGRSSFYCLEYFPSQMLRTGNNFTFSYTFEDVPFHSSYAHSQSLDRLMNPLIDQYLYYLSRTNTPSGTTTQSRLQFSQAGASDIRDQSRNWLPGPCYRQQRVSKTSADNNNSEYSWTGATKYHLNGRDSLVNPGPAMASHKDDEEKFFPQSGVLIFGKQGSEKTNVDIEKVMTTDEEEIRTTNPVATEQYGSVSTNLQRGNRQAATADVNTQGVLPGMVWQDRDVYLQGPIWAKIPHTDGHFHPSPLMGGFGLKHPPPQILIKNTPVPANPSTTFSAAKFASFITQYSTGQVSVEIEWELQKENSKRWNPEIQYTSNYNKSVNVDFTVDTNGVYSEPRPIGTRYLTRNL

SEQ ID NO: 1751 - protein, 735 aa, Artificial Sequence
  Synthetic Polypeptide
MAADGYLPDWLEDTLSEGIRQWWKLKPGPPPPKPAERHKDDSRGLVLPGYKYLGPFNGLDKGEPVNEADAAALEHDKAYDRQLDSGDNPYLKYNHADAEFQERLKEDTSFGGNLGRAVFQAKKRVLEPLGLVEEPVKTAPGKKRPVEHSPVEPDPSSGTGKAGQQPARKRLNFGQTGDADSVPDPQPLGQPPAAPSGLGTNTMATGSGAPMADNNEGADGVGNSSGNWHCDSTWMGDRVITTSTRTWALPTYNNHLYKQISSQSGASNDNHYFGYSTPWGYFDFNRFHCHFSPRDWQRLINNNWGFRPKRLNFKLFNIQVKEVTQNDGTTTIANNLTSTVQVFTDSEYQLPYVLGSAHQGCLPPFPADVFMVPQYGYLTLNNGSQAVGRSSFYCLEYFPSQMLRTGNNFTFSYTFEDVPFHSSYAHSQSLDRLMNPLIDQYLYYLSRTNTPSGTTTQSRLQFSQAGASDIRDQSRNWLPGPCYRQQRVSKTSADNNNSEYSWTGATKYHLNGRDSLVNPGPAMASHKDDEEKFFPQSGVLIFGKQGSEKTNVDIEKVMITDEEEIRTTNPVATEQYGSVSTNLQRGNRQAATADVNTQGVLPGMVWQDRDVYLQGPIWAKIPHTDGHFHPSPLMGGFGLKHPPPQILIKNTPVPANPSTTFSAAKFASFITQYSTGQVSVEIEWELQKENSKRWNPEIQYTSNYNKSVNVDFTVDTNGVYSEPRPIGTRYLTRNL

SEQ ID NO: 1752 - protein, 735 aa, Artificial Sequence
  Synthetic Polypeptide
MAADGYLPDWLEDTLSEGIRQWWKLKPGPPPPKPAERHKDDSRGLVLPGYKYLGPFNGLDKGEPVNEADAAALEHDKAYDRQLDSGDNPYLKYNHADAEFQERLKEDTSFGGNLGRAVFQAKKRVLEPLGLVEEPVKTAPGKKRPVEHSPVEPDSSSGTGKAGQQPARKRLNFGQTGDADSVPDPQPLGQPPAAPSGLGTNTMATGSGAPMADNNEGADGVGNSSGNWHCDSTWMGDRVITTSTRTWALPTYNNHLYKQISSQSGASNDNHYFGYSTPWGYFDFNRFHCHFSPRDWQRLINNNWGFRPKRLNFKLFNIQVKEVTQNDGTTTIANNLTSTVQVFTDSEYQLPYVLGSAHQGCLPPFPADVFMVPQYGYLTLNNGSQAVGRSSFYCLEYFPSQMLRTGNNFTFSYTFEDVPFHSSYAHSQSLDRLMNPLIDQYLYYLSRTNTPSGTTTQSRLQFSQAGASDIRDQSRNWLPGPCYRQQRVSKTSADNNNSEYSWTGATKYHLNGRDSLVNPGPAMASHKDDEEKFFPQSGVLIFGKQGSEKTNVDIEKVMITDEEEIRTTNPVATEQYGSVSTNLQRGNRQAATADVNTQGVLPGMVWQDRDVYLQGPIWAKIPHTDGHFHPSPLMGGFGLKHPPPQILIKNTPVPANPSTTFSAAKFASFITQYSTGQVSVEIEWELQKENSKRWNPEIQYTSNYNKSVNVDFTVDTNGVYSESRPIGTRYLTRNL

SEQ ID NO: 1753 - protein, 735 aa, Artificial Sequence
  Synthetic Polypeptide
MAADGYLPDWLEDTLSEGIRQWWKLKPGPPPPKPAERHKDDSRGLVLPGYKYLGPFNGLDKGEPVNEADAAALEHDKAYDRQLDSGDNPYLKYNHADAEFQERLKEDTSFGGNLGRAVFQAKKRVLEPLGLVEEPVKTAPGKKRPVEHSPVEPDSSSGTGKAGQQPARKRLNFGQTGDADSVPDPQPLGQPPAAPSGLGTNTMATGSGAPMADNNEGADGVGNSSGNWHCDSTWMGDRVITTSTRTWALPTYNNHLYKQISSQSGASNDNHYFGYSTPWGYFDFNRFHCHFSPRDWQRLINNNWGFRPKRLNFKLFNIQVKEVTQNDGTTTIANNLTSTVQVFTDSEYQLPYVLGSAHQGCLPPFPADVFMVPQYGYLTPNNGSQAVGRSSFYCLEYFPSQMLRTGNNFTFSYTFEDVPFHSSYAHSQSLDRLMNPLIDQYLYYLSRTNTPSGTTTQSRLQFSQAGASDIRDQSRNWLPGPCYRQQRVSKTSADNNNSEYSWTGATKYHLNGRDSLVNPGPAMASHKDDEEKFFPQSGVLIFGKQGSEKTNVDIEKVMITDEEEIRTTNPVATEQYGSVSTNLQRGNRQAATADVNTQGVLPGMVWQDRDVYLQGPIWAKIPHTDGHFHPSPLMGGFGLKHPPPQILIKNTPVPANPSTTFSAAKFASFITQYSTGQVSVEIEWELQKENSKRWNPEIQYTSNYNKSVNVDFTVDTNGVYSEPRPIGTRYLTRNL

SEQ ID NO: 1754 - protein, 735 aa, Artificial Sequence
  Synthetic Polypeptide
MAADGYLPDWLEDTLSEGIRQWWKLKPGPPPPKPAERHKDDSRGLVLPGYKYLGPFNGLDKGEPVNEADAAALEHDKAYDRQLDSGDNPYLKYNHADAEFQERLKEDTSFGGNLGRAVFQAKKRVLEPLGLVEEPVKTAPGKKRPVEHSPVEPDSSSGTGKAGQQPARKRLNFGQTGDADSVPDPQPLGQPPAAPSGLGTNTMATGSGAPMADNNEGADGVGNSSGNWHCDSTWMGDRVITTSTRTWALPTYNNHLYKQISSQSGASNDNHYFGYSTPWGYFDFNRFHCHFSPRDWQRLINNNWGFRPKRLNFKLFNIQVKEVTQNDGTTTIANNLTSTVQVFTDSEYQLPYVLGSAHQGCLPPFPADVFMVPQYGYLTLNNGSQAVGRSSFYCLEYFPSQMLRTGNNFTFSYTFEDVPFHSSYAHSQSLDRLMNPLIDQYLYYLSRTNTPSGTTTQSRLQFSQAGASDIRDQSRNWLPGPCYRQQRVSKTSADNNNSEYSWTGATKYHLNGRDSLVNPGPAMASHKDDEEKFFPQSGVLIFGKQGSEKTNVDIEKVMITDEEEIRTTNPVATEQYGSVSTNLQRGNRQAATADVNTQGVLPGMAWQDRDVYLQGPIWAKIPHTDGHFHPSPLMGGFGLKHPPPQILIKNTPVPANPSTTFSAAKFASFITQYSTGQVSVEIEWELQKENSKRWNPEIQYTSNYNKSVNVDFTVDTNGVYSEPRPIGTRYLTRNL

SEQ ID NO: 1755 - protein, 735 aa, Artificial Sequence
  Synthetic Polypeptide
MAADGYLPDWLEDTLSEGIRQWWKLKPGPPPPKPAERHKDDSRGLVLPGYKYLGPFNGLDKGEPVNEADAAALEHDKAYDRQLDSGDNPYLKYNHADAEFQERLKEDTSFGGNLGRAVFQAKKRVLEPLGLVEEPVKTAPGKKRPVEHSPVEPDSSSGTGKAGQQPARKRLNFGQTGDADSVPDPQPLGQPPAAPTSLGSTTMATGSGAPMADNNEGADGVGNSSGNWHCDSQWLGDRVITTSTRTWALPTYNNHLYKQISSQSGASNDNHYFGHSTPWGYFDFNRFHCHFSPRDWQRLINNNWGFRPKRLNFKLFNIQVKEVTQNDGTTTIANNLTSTVQVFTDSEYQLPYVLGSAHQGCLPPFPADVFMVPQYGYLTLNNGSQAVGRSSFYCLEYFPSQMLRTGNNFTFSYTFEDVPFHSSYAHSQSLDRLMNPLIDQYLYYLSRTNTPSGTTTQSRLQFSQAGASDIRDQSRNWLPGPCYRQQRVSKTSADNNNSEYSWTGATKYHLNGRDSLVNPGPAMASHKDDEEKFFPQSGVLIFGKQGSEKTNVDIEKVMITDEEEIRTTNPVATEQYGSVSTNLQRGNRQAATADVNTQGVLPGMVWQDRDVYLQGPIWAKIPHTDGHFHPSPLMGGFGLKHPPPQILIKNTPVPANPSTTFSAAKFASFITQYSTGQVSVEIEWELQKENSKRWNPEIQYTSNYNKSVNVDFTVDTNGVYSEPRPIGTRYLTRNL

SEQ ID NO: 1756 - protein, 735 aa, Artificial Sequence
  Synthetic Polypeptide
MAADGYLPDWLEDTLSEGIRQWWKLKPGPPPPKPAERHKDDSRGLVLPGYKYLGPFNGLDKGEPVNEADAAALEHDKAYDRQLDSGDNPYLKYNHADAEFQERLKEDTSFGGNLGRAVFQAKKRVLEPLGLVEEPVKTAPGKKRPVEHSPVEPDSSSGTGKAGQQPARKRLNFGQTGDADSVPDPQPLGQPPAAPSGLGTNTMATGSGAPMADNNEGADGVGNSSGNWHCDSTWMGDRVITTSTRTWALPTYNNHLYKQISSQSGASNDNHYFGYSTPWGYFDFNRFHCHFSPRDWQRLINNNWGFRPKRLNFKLFNIQVKEVTQNDGTTTIANNLTSTVQVFTDSEYQLPYVLGSAHQGCLPPFPADVFMVPQYGYLTLNNGSQAVGRSSFYCLEYFPSQMLRTGNNFTFSYTFEDVPFHSSYAHSQSLDRLMNPLIDQYLYYLSRTNTPSGTTTQSRLQFSQAGASDIRDQSRNWLPGPCYRQQRVSKTSADNNNSEYSWTGATKYHLNGRDSLVNPGPAMASHKDDEEKFFPQSGVLIFGKQGSEKTNVDIEKVMITDEEEIRTTNPVATEQYGSVSTNLQRGNRQAATADVNTQGVLPGMVWQDRDVYLQGPIWAKIPHTDGHFHPSPLMGGFGLKHPPPQILIKNTPVPANPSTTFSAAKFASFITQYSTGQASVEIEWELQKENSKRWNPEIQYTSNYNKSVNVDFTVDTNGVYSEPRPIGTRYLTRNL

SEQ ID NO: 1757 - protein, 735 aa, Artificial Sequence
  Synthetic Polypeptide
MAADGYLPDWLEDTLSEGIRQWWKLKPGPPPPKPAERHKDDSRGLVLPGYKYLGPFNGLDKGEPVNEADAAALEHDKAYDRQLDSGDNPYLKYNHADAEFQERLKEDTSFGGNLGRAVFQAKKRVLEPLGLVEEPVKTAPGKKRPVEHSPVEPDSSSGTGKAGQQPARKRLNFGQTGDADSVPDPQPLGQPPAAPSGLGTNTMATGSGAPMADNNEGADGVGNSSGNWHCDSTWMGDRVITTSTRTWALPTYNNHLYKQISSQSGASNDNHYFGYSTPWGYFDFNRFHCHFSPRDWQRLINNNWGFRPKRLNFKLFNIQVKEVTQNDGTTTIANNLTSTVQVFTDSEYQLPYVLGSAHQGCLPPFPADVFMVPQYGYLTLNNGSQAVGRSSFYCLEYFPSQMLRTGNNFTFSYTFEDVPFHSSYAHSQSLDRLMNPLIDQYLYYLSRTNTPSGTTTQSRLQFSQAGASDIRDQSRNWLPGPCYRQQRVSKTSADNNNSEYSWTGATKYHLNGRDSLVNPGPAMASHKDDEEKFFPQSGVLIFGKQGSEKTNVDIEKVMITDEEEIRTTNPVATEQYGSVSTNLQRGNRQAATADVNTQGVLPGMVWQDRDVYLQGPIWAKIPHTDGHFHPSPLMGGFGLKHPPPQILIKNTPVPANPSTTFSAARFASFITQYSTGQVSVEIEWELQKENSKRWNPEIQYTSNYNKSVNVDFTVDTNGVYSEPRPIGTRYLTRNL

SEQ ID NO: 1758 - protein, 735 aa, Artificial Sequence
  Synthetic Polypeptide
MAADGYLPDWLEDTLSEGIRQWWKLKPGPPPPKPAERHKDDSRGLVLPGYKYLGPFNGLDKGEPVNEADAAALEHDKAYDRQLDSGDNPYLKYNHADAEFQERLKEDTSFGGNLGRAVFQAKKRVLEPLGLVEEPVKTAPGKKRPVEHSPVEPDSSSGTGKAGQQPARKRLNFGQTGGADSVPDPQPLGQPPAAPSGLGTNTMATGSGAPMADNNEGADGVGNSSGNWHCDSTWMGDRVITTSTRTWALPTYNNHLYKQISSQSGASNDNHYFGYSTPWGYFDFNRFHCHFSPRDWQRLINNNWGFRPKRLNFKLFNIQVKEVTQNDGTTTIANNLTSTVQVFTDSEYQLPYVLGSAHQGCLPPFPADVFMVPQYGYLTLNNGSQAVGRSSFYCLEYFPSQMLRTGNNFTFSYTFEDVPFHSSYAHSQSLDRLMNPLIDQYLYYLSRTNTPSGTTTQSRLQFSQAGASDIRDQSRNWLPGPCYRQQRVSKTSADNNNSEYSWTGATKYHLNGRDSLVNPGPAMASHKDDEEKFFPQSGVLIFGKQGSEKTNVDIEKVMITDEEEIRTTNPVATEQYGSVSTNLQRGNRQAATADVNTQGVLPGMVWQDRDVYLQGPIWAKIPHTDGHFHPSPLMGGFGLKHPPPQILIKNTPVPANPSTTFSAAKFASFITQYSTGQVSVEIEWELQKENSKRWNPEIQYTSNYNKSVNVDFTVDTNGVYSEPRPIGTRYLTRNL

SEQ ID NO: 1759 - protein, 735 aa, Artificial Sequence
  Synthetic Polypeptide
MAADGYLPDWLEDTLSEGIRQWWKLKPGPPPPKPAERHKDDSRGLVLPGYKYLGPFNGLDKGEPVNEADAAALEHDKAYDRQLDSGDNPYLKYNHADAEFQERLKEDTSFGGNLGRAVFQAKKRVLEPLGLVEEPVKTAPGKKRPVEHSPVEPDSSSGTGKAGQQPARKRLNFGQTGDADSVPDPQPLGQPPAAPSGLGTNTMATGSGAPMADNNEGADGVGNSSGNWHCDSTWMGDRVITTSTRTWALPTYNNHLYKQISSQSGASNDNHYFGYSTPWGYFDFNRFHCHFSPRDWQRLINNNWGFRPKRLNFKLFNIQVKEVTQNDGTTTIANNLTSTVQVFTDSEYQLPYVLGSAHQGCLPPFPADVFMVPQYGYLTLNNGSQAVGRSSFYCLEYFPSQMLRTGNNFTFSYTFEDVPFHSSYAHSQSLDRLMNPLIDQYLYYLSRTNTPSGTTTQSRLQFSQAGASDIRDQSRNWLPGPCYRQQRVSKTSADNNNSEYSWTGATKYHLNGRDSLVNPGPAMASHKDDEEKFFPQSGVLIFGKQGSEKTNVDIEKVMITDEEEIRTTNPVATEQYGSVSTNLQRGNRQAATADVNTQGVLPGMVWQDRDVYLQGPIWAKIPHTDGHFHPSPLMGGFGLKHPPPQILIKNTPVPANPSTTFSAAKFASFITQYSTGQVSVEIEWELQKENSKRWNPEIQYTSNYNKSANVDFTVDTNGVYSEPRPIGTRYLTRNL

SEQ ID NO: 1760 - protein, 735 aa, Artificial Sequence
  Synthetic Polypeptide
MAADGYLPDWLEDTLSEGIRQWWKLKPGPPPPKPAERHKDDSRGLVLPGYKYLGPFNGLDKGEPVNEADAAALEHDKAYDRQLDSGDNPYLKYNHADAEFQERLKEDTSFGGNLGRAVFQAKKRVLEPLGLVEEPVKTAPGKKRPVEHSPVEPDSSSGTGKAGQQPARKRLNFGQTGDADSVPDPQPLGQPPAAPSGLGTNTMATGSGAPMADNNEGADGVGNSSGNWHCDSTWMGDRVITTSTRTWALPTYNNHLYKQISSQSGASNDNHYFGYSTPWGYFDFNRFHCHFSPRDWQRLINNNWGFRPKRLNFKLFNIQVKEVTQNDGTTTIANNLTSTVQVFTDSEYQLPYVLGSAHQGCLPPFPADVFMVPQYGYLTLNNGSQAVGRSSFYCLEYFPSQMLRTGNNFTFSYTFEDVPFHSSYAHSQSLDRLMNPLIDQYLYYLSRTNTPSGTTTQSRLQFSQAGASDIRDRSRNWLPGPCYRQQRVSKTSADNNNSEYSWTGATKYHLNGRDSLVNPGPAMASHKDDEEKFFPQSGVLIFGKQGSEKTNVDIEKVMITDEEEIRTTNPVATEQYGSVSTNLQRGNRQAATADVNTQGVLPGMVWQDRDVYLQGPIWAKIPHTDGHFHPSPLMGGFGLKHPPPQILIKNTPVPANPSTTFSAAKFASFITQYSTGQVSVEIEWELQKENSKRWNPEIQYTSNYNKSVNVDFTVDTNGVYSEPRPIGTRYLTRNL

SEQ ID NO: 1761 - protein, 735 aa, Artificial Sequence
  Synthetic Polypeptide
MAADGYLPDWLEDTLSEGIRQWWKLKPGPPPPKPAERHKDDSRGLVLPGYKYLGPFNGLDKGEPVNEADAAALEHDKAYDRQLDSGDNPYLKYNHADAEFQERLKEDTSFGGNLGRAVFQAKKRVLEPLGLVEEPVKTAPGKKRPVEHSPVEPDSSSGTGKAGQQPARKRLNFGQTGDADSVPDPQPLGQPPAAPSGLGTNTMATGSGAPMADNNEGADGVGNSSGNWHCDSTWMGDRVITTSTRTWALPTYNNHLYKQISSQSGASNDNHYFGYSTPWGYFDFNRFHCHFSPRDWQRLINNNWGFRPKRLNFKLFNIQVKEVTQNDGTTTIANNLTSTVQVFTDSEYQLPYVLGSAHQGCLPPFPADVFMVPQYGYLTLNNGSQAVGRSSFYCLEYFPSQMLRTGNNFTFSYTFEDVPFHSSYAHSQSLDRLMNPLIDQYLYYLSRTNTPSGTTTQSRLQFSQAGASDIRDQSRNWLPGPCYRQQRVSKASADNNNSEYSWTGATKYHLNGRDSLVNPGPAMASHKDDEEKFFPQSGVLIFGKQGSEKTNVDIEKVMITDEEEIRTTNPVATEQYGSVSTNLQRGNRQAATADVNTQGVLPGMVWQDRDVYLQGPIWAKIPHTDGHFHPSPLMGGFGLKHPPPQILIKNTPVPANPSTTFSAAKFASFITQYSTGQVSVEIEWELQKENSKRWNPEIQYTSNYNKSVNVDFTVDTNGVYSEPRPIGTRYLTRNL

SEQ ID NO: 1762 - protein, 735 aa, Artificial Sequence
  Synthetic Polypeptide
MAADGYLPDWLEDTLSEGIRQWWKLKPGPPPPKPAERHKDDSRGLVLPGYKYLGPFNGLDKGEPVNEADAAALEHDKAYDRQLDSGDNPYLKYNHADAEFQERLKEDTSFGGNLGRAVFQAKKRVLEPLGLVEEPVKTAPGKKRPVEHSPVEPDSSSGTGKAGQQPARKRLNFGQTGDADSVPDPQPLGQPPAAPSGLGTNTMATGSGAPMADNNEGADGVGNSSGNWHCDSTWMGDRVITTSTRTWALPTYNNHLYKQISSQSGASNDNHYFGYSTPWGYFDFNRFHCHFSPRDWQRLINNNWGFRPKRLNFKLFNIQVKEVTQNDGTTTIANNLTSTVQVFTDSEYQLPYVLGSAHQGCLPPFPADVFMVPQYGYLTLNNGSQAVGRSSFYCLEYFPSQMLRTGNNFTFSYTFEDVPFHSSYAHSQSLDRLMNPLIDQYLYYLSRTNTPSGTTTQSRLQFSQAGASDIRDQSRNWLPGPCYRQQRVSKTSADNNNSEYSWTGATKHHLNGRDSLVNPGPAMASHKDDEEKFFPQSGVLIFGKQGSEKTNVDIEKVMITDEEEIRTTNPVATEQYGSVSTNLQRGNRQAATADVNTQGVLPGMVWQDRDVYLQGPIWAKIPHTDGHFHPSPLMGGFGLKHPPPQILIKNTPVPANPSTTFSAAKFASFITQYSTGQVSVEIEWELQKENSKRWNPEIQYTSNYNKSVNVDFTVDTNGVYSEPRPIGTRYLTRNL

SEQ ID NO: 1763 - protein, 735 aa, Artificial Sequence
  Synthetic Polypeptide
MAADGYLPDWLEDTLSEGIRQWWKLKPGPPPPKPAERHKDDSRGLVLPGYKYLGPFNGLDKGEPVNEADAAALEHDKAYDRQLDSGDNPYLKYNHADAEFQERLKEDTSFGGNLGRAVFQAKKRVLEPLGLVEEPVKTAPGKKRPVEHSPVEPDSSSGTGKAGQQPARKRLNFGQTGDADSVPDPQPLGQPPAAPSGLGTNTMATGSGAPMADNNEGADGVGNSSGNWHCDSTWMGDRVITTSTRTWALPTYNNHLYKQISSQSGASNDNHYFGYSTPWGYFDFNRFHCHFSPRDWQRLINNNWGFRPKRLNFKLFNIQVKEVTQNDGTTTIANNLTGTVQVFTDSEYQLPYVLGSAHQGCLPPFPADVFMVPQYGYLTLNNGSQAVGRSSFYCLEYFPSQMLRTGNNFTFSYTFEDVPFHSSYAHSQSLDRLMNPLIDQYLYYLSRTNTPSGTTTQSRLQFSQAGASDIRDQSRNWLPGPCYRQQRVSKTSADNNNSEYSWTGATKYHLNGRDSLVNPGPAMASHKDDEEKFFPQSGVLIFGKQGSEKTNVDIEKVMITDEEEIRTTNPVATEQYGSVSTNLQRGNRQAATADVNTQGVLPGMVWQDRDVYLQGPIWAKIPHTDGHFHPSPLMGGFGLKHPPPQILIKNTPVPANPSTTFSAAKFASFITQYSTGQVSVEIEWELQKENSKRWNPEIQYTSNYNKSVNVDFTVDTNGVYSEPRPIGTRYLTRNL

SEQ ID NO: 1764 - protein, 735 aa, Artificial Sequence
  Synthetic Polypeptide
MAADGYLPDWLEDTLSEGIRQWWKLKPGPPPPKPAERHKDDSRGLVLPGYKYLGPFNGLDKGEPVNEADAAALEHDKAYDRQLDSGDNPYLKYNHADAEFQERLKEDTSFGGNLGRAVFRAKKRVLEPLGLVEEPVKTAPGKKRPVEHSPVEPDSSSGTGKAGQQPARKRLNFGQTGDADSVPDPQPLGQPPAAPSGLGTNTMATGSGAPMADNNEGADGVGNSSGNWHCDSTWMGDRVITTSTRTWALPTYNNHLYKQISSQSGASNDNHYFGYSTPWGYFDFNRFHCHFSPRDWQRLINNNWGFRPKRLNFKLFNIQVKEVTQNDGTTTIANNLTSTVQVFTDSEYQLPYVLGSAHQGCLPPFPADVFMVPQYGYLTLNNGSQAVGRSSFYCLEYFPSQMLRTGNNFTFSYTFEDVPFHSSYAHSQSLDRLMNPLIDQYLYYLSRTNTPSGTTTQSRLQFSQAGASDIRDQSRNWLPGPCYRQQRVSKTSADNNNSEYSWTGATKYHLNGRDSLVNPGPAMASHKDDEEKFFPQSGVLIFGKQGSEKTNVDIEKVMITDEEEIRTTNPVATEQYGSVSTNLQRGNRQAATADVNTQGVLPGMVWQDRDVYLQGPIWAKIPHTDGHFHPSPLMGGFGLKHPPPQILIKNTPVPANPSTTFSAAKFASFITQYSTGQVSVEIEWELQKENSKRWNPEIQYTSNYNKSVNVDFTVDTNGVYSEPRPIGTRYLTRNL

SEQ ID NO: 1765 - protein, 735 aa, Artificial Sequence
  Synthetic Polypeptide
MAADGYLPDWLEDTLSEGIRQWWKLKPGPPPPKPAERHKDDSRGLVLPGYKYLGPFNGLDKGEPVNEADAAALEHDKAYDRQLDSGDNPYLKYNHADAEFQERLKEDTSFGGNLGRAVFQAKKRVLEPLGLVEEPVKTAPGKKRPVEHSPVEPDSSSGTGKAGQQPARKRLNFGQTGDADSVPDPQPLGQPPAAPSGLGTNTMATGSGAPMADNNEGADGVGNSSGNWHCDSTWMGDRVITTSTRTWALPTYNNHLYKQISSQSGASNDNHYFGYSTPWGYFDFNRFHCHFSPRDWQRLINNNWGFRPKRLNFKLFNIQVKEVTQNDGTTTIANNLTSTVQVFTDSEYQLPYVLGSAHQGCLPPFPADVFMVPQYGYLTLNNGSQAVGRSSFYCLEYFPSQMLRTGNNFTFSYTFEDVPFHSSYAHSQSLDRLMNPLIDQYLYYLSRTNTPSGTTTQSRLQFSQAGASDIRDQSRNWLPGPCYRQQRVSKTSADNNNSEYSWTGATKYHLNGRDSLVNPGPAMASHKDDEEKFFPQSGVLIFGKQGSEKTNVDIEKVMITDEEEIRTTNPVATEQYGSVSTNLQRGNRQAATADVNTQGVLPGTVWQDRDVYLQGPIWAKIPHTDGHFHPSPLMGGFGLKHPPPQILIKNTPVPANPSTTFSAAKFASFITQYSTGQASVEIEWELQKENSKRWNPEIQYTSNYNKSVNVDFTVDTNGVYSEPRPIGTRYLTRNL

SEQ ID NO: 1766 - protein, 735 aa, Artificial Sequence
  Synthetic Polypeptide
MAADGYLPDWLEDTLSEGIRQWWKLKPGPPPPKPAERHKDASRGLVLPGYKYLGPFNGLDKGEPVNEADAAALEHDKAYDRQLDSGDNPYLKYNHADAEFQERLKEDTSFGGNLGRAVFQAKKRVLEPLGLVEEPVKTAPGKKRPVEHSPVEPDSSSGTGKAGQQPARKRLNFGQTGDADSVPDPQPLGQPPAAPTSLGSTTMATGSGAPMADNNEGADGVGNSSGNWHCDSQWLGDRVITTSTRTWALPTYNNHLYKQISSQSGASNDNHYFGYSTPWGYFDFNRFHCHFSPRDWQRLINNNWGFRPKRLNFKLFNIQVKEVTQNDGTTTIANNLTSTVQVFTDSEYQLPYVLGSAHQGCLPPFPADVFMVPQYGYLTLNNGSQAVGRSSFYCLEYFPSQMLRTGNNFTFSYTFEDVPFHSSYAHSQSLDRLMNPLIDQYLYYLSRTNTPSGTTTQSRLQFSQAGASDIRDQSRNWLPGPCYRQQRVSKTSADNNNSEYSWTGATKYHLNGRDSLVNPGPAMASHKDDEEKFFPQSGVLIFGKQGSEKTNVDIEKVMITDEEEIRTTNPVATEQYGSVSTNLQRGNRQAATADVNTQGVLPGMVWQDRDVYLQGPIWAKIPHTDGHFHPSPLMGGFGLKHPPPQILIKNTPVPANPSTTFSAAKFASFITQYSTGQVSVEIEWELQKENSKRWNPEIQYTSNYNKSVNVDFTVDTNGVYSEPRPIGTRYLTRNL

SEQ ID NO: 1767 - protein, 735 aa, Artificial Sequence
  Synthetic Polypeptide
MAADGYLPDWLEDTLSEGIRQWWKLKPGPPPPKPAERHKDDSRGLVLPGYKYLGPFNGLDKGEPVNEADAAALEHDKAYDRQLDSGDNPYLKYNHADAEFQERLKEDTSFGGNLGRAVFQAKKRVLEPLGLVEEPVKTAPGKKRPVEHSPVEPDSSSGTGKAGQQPARKRLNFGQTGDADSVPDPQPLGQPPAAPSGLGTNTMATGSGAPMADNNEGADGVGNSSGNWHCDSTWMGDRVITTSTRTWALPTYNNHLYKQISSQSGAPNDNHYFGYSTPWGYFDFNRFHCHFSPRDWQRLINNNWGFRPKRLNFKLFNIQVKEVTQNDGTTTIANNLTSTVQVFTDSEYQLPYVLGSAHQGCLPPFPADVFMVPQYGYLTLNNGSQAVGRSSFYCLEYFPSQMLRTGNNFTFSYTFEDVPFHSSYAHSQSLDRLMNPLIDQYLYYLSRTNTPSGTTTQSRLQFSQAGASDIRDQSRNWLPGPCYRQQRVSKTSADNNNSEYSWTGATKYHLNGRDSLVNPGPAMASHKDDEEKFFPQSGVLIFGKQGSEKTNVDIEKVMITDEEEIRTTNPVATEQYGSVSTNLQRGNRQAATADVNTQGVLPGMVWQDRDVYLQGPIWAKIPHTDGHFHPSPLMGGFGLKHPPPQILIKNTPVPANPSTTFSAAKFASFITQYSTGQASVEIEWELQKENSKRWNPEIQYTSNYNKSVNVDFTVDTNGVYSEPRPIGTRYLTRNL

SEQ ID NO: 1768 - protein, 735 aa, Artificial Sequence
  Synthetic Polypeptide
MAADGYLPDWLEDTLSEGIRQWWKLKPGPPPPKPAERHKDDSRGLVLPGYKYLGPFNGLDKGEPVNEADAAALEHDKAYDRQLDSGDNPYLKYNHADAEFQERLKEDTSFGGNLGRAVFQAKKRVLEPLGLVEEPVKTAPGKKRPVEHSPVEPDSSSGTGKAGQQPARKRLNFGQTGDADSVPDPQPLGQPPAAPTSLGSTTMATGSGAPMADNNEGADGVGNSSGNWHCDSQWLGDRVITTSTRTWALPTYNNHLYKQISSQSGASNDNHYFGYSTPWGYFDFNRFHCHFSPRDWQRLINNNWGFRPKRLNFKLFNIQVKEVTQNDGTTTIANNLTSTVQVFTDSEYQLPYVLGSAHQGCLPPFPADVFMVPQYGYLTLNNGSQAVGRSSFYCLEYFPSQMLRTGNNFTFSYTFEDVPFHSSYAHSQSLDRLMNPLIDQYLYYLSRTNTPSGTTTQSRLQFSQAGASDIRDQSRNWLPGPCYRQQRVSKTSADNNNSEYSWTGATKYHLNGRDSLVNPGPAMASHKDDEEKFFPQSGVLIFGKQGSEKTNVDIEKVMITDEEEIRTTNPVATEQYGSVSTNLQRGNRQAATADVNTQGVLPGMVWQDRDVYLQGPIWAKIPHTDGHFHPSPLMGGFGLKHPPPQILIKNTPVPANPSTTFSAAKFASFITQYSTGQVSVEIEWELQKENSKRWNPEIQYTSNYNKSVNVDFTVDTNGVYSEPRPIGTRYLTRNL

SEQ ID NO: 1769 - protein, 735 aa, Artificial Sequence
  Synthetic Polypeptide
MAADGYLPDWLEDILSEGIRQWWKLKPGPPPPKPAERHKDASRGLVLPGYKYLGPFNGLDKGEPVNEADAAALEHDKAYDRQLDSGDNPYLKYNHADAEFQERLKEDTSFGGNLGRAVFQAKKRVLEPLGLVEEPVKTAPGKKRPVEHSPVEPDSSSGTGKAGQQPARKRLNFGQTGDADSVPDPQPLGQPPAAPTSLGSTTMATGSGAPMADNNEGADGVGNSSGNWHCDSQWLGDRVITTSTRTWALPTYNNHLYKQISSQSGASNDNHYFGYSTPWGYFDFNRFHCHFSPRDWQRLINNNWGFRPKRLNFKLFNIQVKEVTQNDGTTTIANNLTSTVQVFTDSEYQLPYVLGSAHQGCLPPFPADVFMVPQYGYLTLNNGSQAVGRSSFYCLEYFPSQMLRTGNNFTFSYTFEDVPFHSSYAHSQSLDRLMNPLIDQYLYYLSRTNTPSGTTTQSRLQFSQAGASDIRDQSRNWLPGPCYRQQRVSKTSADNNNSEYSWTGATKYHLNGRDSLVNPGPAMASHKDDEEKFFPQSGVLIFGKQGSEKTNVDIEKVMITDEEEIRTTNPVATEQYGSVSTNLQRGNRQAATADVNTQGVLPGMVWQDRDVYLQGPIWAKIPHTDGHFHPSPLMGGFGLKHPPPQILIKNTPVPANPSTTFSAAKFASFITQYSTGQVSVEIEWELQKENSKRWNPEIQYTSNYNKSVNVDFTVDTNGVYSEPRPIGTRYLTRNL

SEQ ID NO: 1770 - protein, 735 aa, Artificial Sequence
  Synthetic Polypeptide
MAADGYLPDWLEDTLSEGIRQWWKLKPGPPPPKPAERHKDASRGLVLPGYKYLGPFNGLDKGEPVNEADAAALEHDKAYDRQLDSGDNPYLKYNHADAEFQERLKEDTSFGGNLGRAVFQAKKRVLEPLGLVEEPVKTAPGKKRPVEHSPVEPDSSSGTGKAGQQPARKRLNFGQTGDADSVPDPQPLGQPPAAPSGLGTNTMATGSGAPMADNNEGADGVGNSSGNWHCDSTWMGDRVITTSTRTWALPTYNNHLYKQISSQSGASNDNHYFGYSTPWGYFDFNRFHCHFSPRDWQRLINNNWGFRPKRLNFKLFNIQVKEVTQNDGTTTIANNLTSTVQVFTDSEYQLPYVLGSAHQGCLPPFPADVFMVPQYGYLTLNNGSQAVGRSSFYCLEYFPSQMLRTGNNFTFSYTFEDVPFHSSYAHSQSLDRLMNPLIDQYLYYLSRTNTPSGTTTQSRLQFSQAGASDIRDQSRNWLPGPCYRQQRVSKTSADNNNSEYSWTGATKYHLNGRDSLVNPGPAMASHKDDEEKFFPQSGVLIFGKQGSEKTNVDIEKVMITDEEEIRTTNPVATEQYGSVSTNLQRGNRQAATADVNTQGVLPGMVWQDRDVYLQGPIWAKIPHTDGHFHPSPLMGGFGLKHPPPQILIKNTPVPANPSTTFSAAKFASFITQYSTGQASVEIEWELQKENSKRWNPEIQYTSNYNKSVNVDFTVDTNGVYSEPRPIGTRYLTRNL

SEQ ID NO: 1771 - protein, 735 aa, Artificial Sequence
  Synthetic Polypeptide
MAADGYLPDWLEDTLSEGIRQWWKLKPGPPPPKPAERHKDDSRGLVLPGYKYLGPFNGLDKGEPVNEADAAALEHDKAYDRQLDSGDNPYLKYNHADAEFQERLKEDTSFGGNLGRAVFQAKKRVLEPLGLVEEPVKTAPGKKRPVEHSPVEPDSSSGTGKAGQQPARKRLNFGQTGDADSVPDPQPLGQPPAAPTSLGSTTMATGSGAPMADNNEGADGVGNSSGNWHCDSTWMGDRVITTSTRTWALPTYNNHLYKQISSQSGASNDNHYFGYSTPWGYFDFNRFHCHFSPRDWQRLINNNWGFRPKRLNFKLFNIQVKEVTQNDGTTTIANNLTSTVQVFTDSEYQLPYVLGSAHQGCLPPFPADVFMVPQYGYLTLNNGSQAVGRSSFYCLEYFPSQMLRTGNNFTFSYTFEDVPFHSSYAHSQSLDRLMNPLIDQYLYYLSRTNTPSGTTTQSRLQFSQAGASDIRDQSRNWLPGPCYRQQRVSKTSADNNNSEYSWTGATKYHLNGRDSLVNPGPAMASHKDDEEKFFPQSGVLIFGKQGSEKTNVDIEKVMITDEEEIRTTNPVATEQYGSVSTNLQRGNRQAATADVNTQGVLPGMVWQDRDVYLQGPIWAKIPHTDGHFHPSPLMGGFGLKHPPPQILIKNTPVPANPSTTFSAAKFASFITQYSTGQASVEIEWELQKENSKRWNPEIQYTSNYNKSVNVDFTVDTNGVYSEPRPIGTRYLTRNL

SEQ ID NO: 1772 - protein, 735 aa, Artificial Sequence
  Synthetic Polypeptide
MAADGYLPDWLEDTLSEGIRQWWKLKPGPPPPKPAERHKDASRGLVLPGYKYLGPFNGLDKGEPVNEADAAALEHDKAYDRQLDSGDNPYLKYNHADAEFQERLKEDTSFGGNLGRAVFQAKKRVLEPLGLVEEPVKTAPGKKRPVEHSPVEPDSSSGTGKAGQQPARKRLNFGQTGDADSVPDPQPLGQPPAAPSGLGTNTMATGSGAPMADNNEGADGVGNSSGNWHCDSTWMGDRVITTSTRTWALPTYNNHLYKQISSQSGASNDNHYFGYSTPWGYFDFNRFHCHFSPRDWQRLINNNWGFRPKRLNFKLFNIQVKEVTQNDGTTTIANNLTSTVQVFTDSEYQLPYVLGSAHQGCLPPFPADVFMVPQYGYLTLNNGSQAVGRSSFYCLEYFPSQMLRTGNNFTFSYTFEDVPFHSSYAHSQSLDRLMNPLIDQYLYYLSRTNTPSGTTTQSRLQFSQAGASDIRDQSRNWLPGPCYRQQRVSKTSADNNNSEYSWTGATKYHLNGRDSLVNPGPAMASHKDDEEKFFPQSGVLIFGKQGSEKTNVDIEKVMITDEEEIRTTNPVATEQYGSVSTNLQRGNRQAATADVNTQGVLPGMVWQDRDVYLQGPIWAKIPHTDGHFHPSPLMGGFGLKHPPPQILIKNTPVPANPSTTFSAAKFASFITQYSTGQVSVEIEWELQKENSKRWNPEIQYTSNYNKSVNVDFTVDTNGVYSEPRPIGTRYLTRNL

SEQ ID NO: 1773 - protein, 735 aa, Artificial Sequence
  Synthetic Polypeptide
MAADGYLPDWLEDTLSEGIRQWWKLKPGPPPPKPAERHKDASRGLVLPGYKYLGPFNGLDKGEPVNEADAAALEHDKAYDRQLDSGDNPYLKYNHADAEFQERLKEDTPFGGNLGRAVFQAKKRVLEPLGLVEEPVKTAPGKKRPVEHSPVEPDSSSGTGKAGQRPARKRLNFGQTGDADSVPDPQPLGQPPAAPTSLGSTTMATGSGAPMADNNEGADGVGNSSGNWHCDSQWLGDRVITTSTRTWALPTYNNHLYKQIPSQSGASNDNHYFGYSTPWGYFDFNRFHCHFSPRDWQRLINNNWGFRPKRLNFKLFNIQVKEVTQNDGTTTIANNLTSTVQVFTDSEYQLPYVLGSAHQGCLPPFPADVFMVPQYGYLTLNNGSQAVGRSSFYCLEYFPSQMLRTGNNFTFSYTFEDVPFHSSYAHSQSLDRLMNPLIDQYLYYLSRTNTPSGTTTQSRLQFSQAGASDIRDQSRNWLPGPCYRQQRVSKTSADNNNSEYSWTGATKYHLNGRDSLVNPGPAMASHKDDEEKFFPQSGVLIFGKQGSEKTNVDIEKVMITDEEEIRTTNPVATEQYGSVSTNLQRGNRQAATADVNTQGVLPGMVWQDRDVYLQGPIWAKIPHTDGHFHPSPLMGGFGLKHPPPQILIKNTPVPANPSTTFSAAKFASFITQYSTGQASVEIEWELQKENSKRWNPEIQYTSNYNKSVNVDFTVDTNGVYSEPRPIGTRYLTRNL

SEQ ID NO: 1774 - protein, 735 aa, Artificial Sequence
  Synthetic Polypeptide
MAADGYLPDWLEDTLSEGIRQWWKLKPGPPPPKPAERHKDDSRGLVLPGYKYLGPFNGLDKGEPVNEADAAALEHDKAYDRQLDSGDNPYLKYNHADAEFQERLKEDTSFGGNLGRAVFQAKKRVLEPLGLVEEPVKTAPGKKRPVEHSPVEPDSSSGTGKAGQQPARKRLNFGQTGDADSVPDPQPLGQPPAAPTSLGSTTMATGSGAPMADNNEGADGVGNSSGNWHCDSTWMGDRVITTSTRTWALPTYNNHLYKQISSQSGASNDNHYFGYSTPWGYFDFNRFHCHFSPRDWQRLINNNWGFRPKRLNFKLFNIQVKEVTQNDGTTTIANNLTSTVQVFTDSEYQLPYVLGSAHQGCLPPFPADVFMVPQYGYLTLNNGSQAVGRSSFYCLEYFPSQMLRTGNNFTFSYTFEDVPFHSSYAHSQSLDRLMNPLTDQYLYYLSRTNTPSGTTTQSRLQFSQAGASDIRDQSRNWLPGPCYRQQRVSKTSADNNNSEYSWTGATKYHLNGRDSLVNPGPAMASHKDDEEKFFPQSGVLIFGKQGSEKTNVDIEKVMITDEEEIRTTNPVATEQYGSVSTNLQRGNRQAATADVNTQGVLPGMVWQDRDVYLQGPIWAKIPHTDGHFHPSPLMGGFGLKHPPPQILIKNTPVPANPSTTFSAAKFASFITQYSTGQVSVEIEWELQKENSKRWNPEIQYTSNYNKSVNVDFTVDTNGVYSEPRPIGTRYLTRNL

SEQ ID NO: 1775 - protein, 735 aa, Artificial Sequence
  Synthetic Polypeptide
MAADGYLPDWLEDTLSEGIRQWWKLKPGPPPPKPAERHKDDSRGLVLPGYKYLGPFNGLDKGEPVNEADAAALEHDKAYDRQLDSGDNPYLKYNHADAEFQERLKEDTSFGGNLGRAVFQAKKRVLEPLGLVEEPVKTAPGKKRPVEHSPVEPDSSSGTGKAGQQPARKRLNFGQTGDADSVPDPQPLGQPPAAPSGLGTNTMATGSGAPMADNNEGADGVGNSSGNWHCDSTWMGDRVITTSTRTWALPTYNNHLYKQISSQSGASNDNHYFGYSTPWGYFDFNRFHCHFSPRDWQRLINNNWGFRPKRLNFKLFNIQVKEVTQNDGTTTIANNLTSTVQVFTDSEYQLPYVLGSAHQGCLPPFPADVFMVPQYGYLTLNNGSQAVGRSSFYCLEYFPSQMLRTGNNFTFSYTFEDVPFHSSYAHSQSLDRLMNPLIDQYLYYLSRTNTPSGTTAQSRLQFSQAGASDIRDQSRNWLPGPCYRQQRVSKTSADNNNSEYSWTGATKYHLNGRDSLVNPGPAMASHKDDEEKFFPQSGVLIFGKQGSEKTNVDIEKVMITDEEEIRTTNPVATEQYGSVSTNLQRGNRQAATADVNTQGVLPGMVWQDRDVYLQGPIWAKIPHTDGHFHPSPLMGGFGLKHPPPQILIKNTPVPANPSTTFSAAKFASFITQYSTGQVSVEIEWELQKENSKRWNPEIQYTSNYNKSVNVDFTVDTNGVYSEPRPIGTRYLTRNL

SEQ ID NO: 1776 - protein, 735 aa, Artificial Sequence
  Synthetic Polypeptide
MAADGYLPDWLEDTLSEGIRQWWKLKPGPPPPKPAERHKDDSRGLVLPGYKYLGPFNGLDKGEPVNEADAAALEHDKAYDRQLDSGDNPYLKYNHADAEFQERLKEDTSFGGNLGRAVFQAKKRVLEPLGLVEEPVKTAPGKKRPVEHSPVEPDSSSGTGKAGQQPARKRLNFGQTGDADSVPDPQPLGQPPAAPSGLGTNTMATGSGAPMADNNEGADGVGNSSGNWHCDSTWMGDRVITTSTRTWALPTYNNHLYKQISSQSGASNGNHYFGYSTPWGYFDFNRFHCHFSPRDWQRLINNNWGFRPKRLNFKLFNIQVKEVTQNDGTTTIANNLTSTVQVFTDSEYQLPYVLGSAHQGCLPPFPADVFMVPQYGYLTLNNGSQAVGRSSFYCLEYFPSQMLRTGNNFTFSYTFEDVPFHSSYAHSQSLDRLMNPLIDQYLYYLSRTNTPSGTTTQSRLQFSQAGASDIRDQSRNWLPGPCYRQQRVSKTSADNNNSEYSWTGATKYHLNGRDSLVNPGPAMASHKDDEEKFFPQSGVLIFGKQGSEKTNVDIEKVMITDEEEIRTTNPVATEQYGSVSTNLQRGNRQAATADVNTQGVLPGMVWQDRDVYLQGPIWAKIPHTDGHFHPSPLMGGFGLKHPPPQILIKNTPVPANPSTTFSAAKFASFITQYSTGQVSVEIEWELQKENSKRWNPEIQYTSNYNKSVNVDFTVDTNGVYSEPRPIGTRYLTRNL

SEQ ID NO: 1777 - protein, 735 aa, Artificial Sequence
  Synthetic Polypeptide
MAADGYLPDWLEDTLSEGIRQWWKLKPGPPPPKPAERHKDDSRGLVLPGYKYLGPFNGLDKGEPVNEADAAALEHDKAYDRQLDSGDNPYLKYNHADAEFQERLKEDTSFGGNLGRAVFQAKKRVLEPLGLVEEPVKTAPGKKRPVEHSPVEPDSSSGTGKAGQQPARKRLNFGQTGDADSVPDPQPLGQPPAAPSGLGTNTMATGSGAPMADNNEGADGVGNSSGNWHCDSTWMGDRVITTSTRTWALPTYNNHLYKQISSQSGASNDNHYFGYSTPWGYFDFNRFHCHFSPRDWQRLINNNWGFRPKRLNFKLFNIQVKEVTQNDGTTTIANNLTSTVQVFTDSEYQLPYVLGSAHQGCLPPFPADVFMVPQYGYLTLNNGSQAVGRSSFYCLEYFPSQMLRTGNNFTFSYTFEDVPFHSSYAHSQSLDRLMNPLIDQYLYYLSRTNTPSGTTTQSRLQFSQAGASDIRDQSRNWLPGPCYRQQRVSKTSADNNNSEYSWTGATKYHLNGRDSLVNPGPAMASHKDDEEKFFPQSGVLIFGKQGSEKTNVDIERVMITDEEEIRTTNPVATEQYGSVSTNLQRGNRQAATADVNTQGVLPGMVWQDRDVYLQGPIWAKIPHTDGHFHPSPLMGGFGLKHPPPQILIKNTPVPANPSTTFSAAKFASFITQYSTGQVSVEIEWELQKENSKRWNPEIQYTSNYNKSVNVDFTVDTNGVYSEPRPIGTRYLTRNL

SEQ ID NO: 1778 - protein, 735 aa, Artificial Sequence
  Synthetic Polypeptide
MAADGYLPDWLEDTLSEGIRQWWKLKPGPPPPKPAERHKDDSRGLVLPGYKYLGPFNGLDKGEPVNEADAAALEHDKAYDRQLDSGDNPYLKYNHADAEFQERLKEDTSFGGNLGRAVFQAKKRVLEPLGLVEEPVKTAPGKKRPVEHSPVEPDSSSGTGKAGQQPARKRLNFGQTGDADSVPDPQPLGQPPAAPSGLGTNTMATGSGAPMADNNEGADGVGNSSGNWHCDSTWMGDRVITTSTRTWALPTYNNHLYKQISSQSGASNDNHCFGYSTPWGYFDFNRFHCHFSPRDWQRLINNNWGFRPKRLNFKLFNIQVKEVTQNDGTTTIANNLTSTVQVFTDSEYQLPYVLGSAHQGCLPPFPADVFMVPQYGYLTLNNGSQAVGRSSFYCLEYFPSQMLRTGNNFTFSYTFEDVPFHSSYAHSQSLDRLMNPLIDQYLYYLSRTNTPSGTTTQSRLQFSQAGASDIRDQSRNWLPGPCYRQQRVSKTSADNNNSEYSWTGATKYHLNGRDSLVNPGPAMASHKDDEEKFFPQSGVLIFGKQGSEKTNVDIEKVMITDEEEIRTTNPVATEQYGSVSTNLQRGNRQAATADVNTQGVLPGMVWQDRDVYLQGPIWAKIPHTDGHFHPSPLMGGFGLKHPPPQILIKNTPVPANPSTTFSAAKFASFITQYSTGQVSVEIEWELQKENSKRWNPEIQYTSNYNKSVNVDFTVDTNGVYSEPRPIGTRYLTRNL

SEQ ID NO: 1779 - protein, 735 aa, Artificial Sequence
  Synthetic Polypeptide
MAADGYLPDWLEDTLSEGIRQWWKLKPGPPPPKPAERHKDDSRGLVLPGYKYLGPFNGLDKGEPVNEADAAALEHDKAYDRQLDSGDNPYLKYNHADAEFQERLKEDTSFGGNLGRAVFQAKKRVLEPLGLVEEPVKTAPGKKRPVEHSPVEPDSSSGTGKAGQQPARKRLNFGQTGDADSVPDPQPLGQPPAAPSGLGTNTMATGSGAPMADNNEGADGVGNSSGNWHCDSTWMGDRVITTSTRTWALPTYNNHLYKQISSQSGASNDNHYFGYSTPWGYFDFNRFHCHFSPRDWQRLINNNWGFRPKRLNFKLFNIQVKEVTQNDGTTTIANNLTSTVQVFTDSEYQLPYVLGSAHQGCLPPFPADVFMVPQYGYLTLNNGSQAVGRSSFYCLEYFPSQMLRTGNNFTFSYTFEDVPFHSSYAHSQSLDRLMNPLIDQYLYYLSRTNTPSGTTTQSRLQFSQAGASDIRDQSRNWLPGPCYRQQRVSKTSADNNNSEYSWTGATKYHLNGRDSLVNPGPAMASHKDDEEKFFPQSGVLIFGKQGSEKTNVDIEKVMITDEEEIRTTNPVATEQYGSVSTNLQRGNRQAATADVNTQGVLPGMVWQDRDVYLQGPIWAKIPHTDGHFHPSPLMGGFGLKHPPPQILIKNTPVPANPSTTFSAAKFASFITQYSTGQVSVEIEWELQKENSKRWNPEIQYTSNYNKSVNADFTVDTNGVYSEPRPIGTRYLTRNL

SEQ ID NO: 1780 - protein, 735 aa, Artificial Sequence
  Synthetic Polypeptide
MAADGYLPDWLEDTLSEGIRQWWKLKPGPPPPKPAERHRDDSRGLVLPGYKYLGPFNGLDKGEPVNEADAAALEHDKAYDRQLDSGDNPYLKYNHADAEFQERLKEDTSFGGNLGRAVFQAKKRVLEPLGLVEEPVKTAPGKKRPVEHSPVEPDSSSGTGKAGQQPARKRLNFGQTGDADSVPDPQPLGQPPAAPSGLGTNTMATGSGAPMADNNEGADGVGNSSGNWHCDSTWMGDRVITTSTRTWALPTYNNHLYKQISSQSGASNGNHYFGYSTPWGYFDFNRFHCHFSPRDWQRLINNNWGFRPKRLNFKLFNIQVKEVTQNDGTTTIANNLTSTVQVFTDSEYQLPYVLGSAHQGCLPPFPADVFMVPQYGYLTLNNGSQAVGRSSFYCLEYFPSQMLRTGNNFTFSYTFEDVPFHSSYAHSQSLDRLMNPLIDQYLYYLSRTNTPSGTTTQSRLQFSQAGASDIRDQSRNWLPGPCYRQQRVSKTSADNNNSEYSWTGATKYHLNGRDSLVNPGPAMASHKDDEEKFFPQSGVLIFGKQGSEKTNVDIEKVMITDEEEIRTTNPVATEQYGSVSTNLQRGNRQAATADVNTQGVLPGMVWQDRDVYLQGPIWAKIPHTDGHFHPSPLMGGFGLKHPPPQILIKNTPVPANPSTTFSAAKFASFITQYSTGQVSVEIEWELQKENSKRWNPEIQYTSNYNKSVNVDFTVDTNGVYSEPRPIGTRYLTRNL

SEQ ID NO: 1781 - protein, 735 aa, Artificial Sequence
  Synthetic Polypeptide
MAADGYLPDWLEDTLSEGIRQWWKLKPGPPPPKPAERHKDDSRGLVLPGYKYLGPFNGLDKGEPVNEADAAALEHDKAYDRQLDSGDNPYLKYNHADAEFQERLKEDTSFGGNLGRAVFQAKKRVLEPLGLVEEPVKTAPGKKRPVEHSPVEPDSSSGTGKAGQQPARKRLNFGQTGDADSVPDPQPLGQPPAAPSGLGTNTMATGSGAPMADNNEGADGVGNSSGNWHCDSTWMGDRVITTSTRTWALPTYNNHLYKQISSQSGASNDNHYFGYSTPWGYFDFNRFHCHFSPRDWQRLINNNWGFRPKRLNFKLFNIQVKEVTQNDGTTTIANNLTSTVQVFTDSEYQLPYVLGSAHQGCLPPFPADVFMVPQYGYLTLNNGSRAVGRSSFYCLEYFPSQMLRTGNNFTFSYTFEDVPFHSSYAHSQSLDRLMNPLIDQYLYYLSRTNTPSGTTTQSRLQFSQAGASDIRDQSRNWLPGPCYRQQRVSKASADNNNSEYSWTGATKYHLNGRDSLVNPGPAMASHKDDEEKFFPQSGVLIFGKQGSEKTNVDIEKVMITDEEEIRTTNPVATEQYGSVSTNLQRGNRQAATADVNTQGVLPGMVWQDRDVYLQGPIWAKIPHTDGHFHPSPLMGGFGLKHPPPQILIKNTPVPANPSTTFSAAKFASFITQYSTGQVSVEIEWELQKENSKRWNPEIQYTSNYNKSVNVDFTVDTNGVYSEPRPIGTRYLTRNL

SEQ ID NO: 1782 - protein, 735 aa, Artificial Sequence
  Synthetic Polypeptide
MAADGYLPDWLEDTLSEGIRQWWKLKPGPPPPKPAERHRDDSRGLVLPGYKYLGPFNGLDKGEPVNEADAAALEHDKAYDRQLDSGDNPYLKYNHADAEFQERLKEDTSFGGNLGRAVFQAKKRVLEPLGLVEEPVKTAPGKKRPVEHSPVEPDSSSGTGKAGQQPARKRLNFGQTGDADSVPDPQPLGQPPAAPSGLGTNTMATGSGAPMADNNEGADGVGNSSGNWHCDSTWMGDRVITTSTRTWALPTYNNHLYKQISSQSGASNGNHYFGYSTPWGYFDFNRFHCHFSPRDWQRLINNNWGFRPKRLNFKLFNIQVKEVTQNDGTTTIANNLTSTVQVFTDSEYQLPYVLGSAHQGCLPPFPADVFMVPQYGYLTLNNGSQAVGRSSFYCLEYFPSQMLRTGNNFTFSYTFEDVPFHSSYAHSQSLDRLMNPLIDQYLYYLSRTNTPSGTTTQSRLQFSQAGASGIRDQSRNWLPGPCYRQQRVSKTSADNNNSEYSWTGATKYHLNGRDSLVNPGPAMASHKDDEEKFFPQSGVLIFGKQGSEKTNVDIEKVMITDEEEIRTTNPVATEQYGSVSTNLQRGNRQAATADVNTQGVLPGMVWQDRDVYLQGPIWAKIPHTDGHFHPSPLMGGFGLKHPPPQILIKNTPVPANPSTTFSAAKFASFITQYSTGQVSVEIEWELQKENSKRWNPEIQYTSNYNKSVNVDFTVDTNGVYSEPRPIGTRYLTRNL

SEQ ID NO: 1783 - protein, 735 aa, Artificial Sequence
  Synthetic Polypeptide
MAADGYLPDWLEDTLSEGIRQWWKLKPGPPPPKPAERHRDDSRGLVLPGYKYLGPFNGLDKGEPVNEADAAALEHDKAYDRQLDSGDNPYLKYNHADAEFQERLKEDTSFGGNLGRAVFQAKKRVLEPLGLVEEPVKTAPGKKRPVEHSPVEPDSSSGTGKAGQQPARKRLNFGQTGDADSVPDPQPLGQPPAAPSGLGTNTMATGSGAPMADNNEGADGVGNSSGNWHCDSTWMGDRVITTSTRTWALPTYNNHLYKQISSQSGASNGNHYFGYSTPWGYFDFNRFHCHFSPRDWQRLINNNWGFRPKRLNFKLFNIQVKEVTQNDGTTTIANNLTSTVQVFTDSEYQLPYVLGSAHQGCLPPFPADVFMVPQYGYLTLNNGSQAVGRSSFYCLEYFPSQMLRTGNNFTFSYTFEDVPFHSNYAHSQSLDRLMNPLIDQYLYYLSRTNTPSGTTTQSRLQFSQAGASDIRDQSRNWLPGPCYRQQRVSKTSADNNNSEYSWTGATKYHLNGRDSLVNPGPAMASHKDDEEKFFPQSGVLIFGKQGSEKTNVDIEKVMITDEEEIRTTNPVATEQYGSVSTNLQRGNRQAATADVNTQGVLPGMVWQDRDVYLQGPIWAKIPHTDGHFHPSPLMGGFGLKHPPPQILIKNTPVPANPSTTFSAAKFASFITQYSTGQVSVEIEWELQKENSKRWNPEIQYTSNYNKSVNVDFTVDTNGVYSEPRPIGTRYLTRNL

SEQ ID NO: 1784 - protein, 735 aa, Artificial Sequence
  Synthetic Polypeptide
MAADGYLPDWLEDTLSEGIRQWWKLKPGPPPPKPAERHKDDSRGLVLPGYKYLGPFNGLDKGEPVNEADAAALEHDKAYDRQLDSGDNPYLKYNHADAEFQERLKEDTSFGGNLGRAVFQAKKRVLEPLGLVEEPVKTAPGKKRPVEHSPVEPDSSSGTGKAGQQPARKRLNFGQTGDADSVPDPQPLGQPPAAPSGLGTNTMATGSGAPMADNNEGADGVGNSSGNWHCDSTWMGDRVITTSTRTWALPTYNNHLYKQISSQSGASNDNHYFGYSTPWGYFDFNRFHCHFSPRDWQRLINNNWGFRPKRLNFKLFNIQVKEVTQNDGTTTIANNLTSTVQVFTDSEYQLPYVLGSAHQGCLPPFPADVFMVPQYGYLTLNNGSQAVGRSSFYCLEYFPSQMLRTGNNFTFSYTFEDVPFHSSYAHSQSLDRLMNPLIDQYLYYLSRTNTPSGTTTQSRLQFSQAGASDIRDQSRNWLPGPCYRQQRVSKTSADNNNSEYSWTGATKYHLNGRDSLVNPGPAMASHKDDEEKFFPQSGVLIFGKQGSEKTNVDIEKVMITDEEEIRTTNPVATEQYGSVSTNLQRGNRQAATADVNTQGVLPGMVWQDRDVYLQGPIWAKIPHTDGHFHPSPLMGGFGLKHPPPQILIKNTPVPANPSTTFSAAKFASFITQYSAGQVSVEIEWELQKENSKRWNPEIQYTSNYNKSVNVDFTVDTNGVYSEPRPIGTRYLTRNL

SEQ ID NO: 1785 - protein, 735 aa, Artificial Sequence
  Synthetic Polypeptide
MAADGYLPDWLEDTLSEGIRQWWKLKPGPPPPKPAERHKDDSRGLVLPGYKYLGPFNGLDKGEPVNEADAAALEHDKAYDRQLDSGDNPYLKYNHADAEFQERLKEDTSFGGNLGRAVFQAKKRVLEPLGLVEEPVKTAPGKKRPVEHSPVEPDSSSGTGKAGQQPARKRLNFGQTGDADSVPDPQPLGQPPAAPSGLGTNTMATGSGAPMADNNEGADGVGNSSGNWHCDSTWMGDRVITTSTRTWALPTYNNHLYKQISSQSGASNDNHYFGYSTPWGYFDFNRFHCHFSPRDWQRLINNNWGFRPKRLNFKLFNIQVKEVTQNDGTTTIANNLTSTVQVFTDSEYQLPYVLGSAHQGCLPPFPADVFMVPQYGYLTLNNGSQAVGRSSFYCLEYFPSQMLRTGNNFTFSYTFEDVPFHSSYAHSQSLDRLMNPLIDQYLYYLSRTNTPSGTTTQSRLQFSQAGASDIRDQSRNWLPGPCYRQQRVSKTSADNNNSEYSWTGATKYHLNGRDSLVNPGPAMASHKDDEEKFFPQSGVLIFGKQGSEKTNVDIEKVMITDEEEIRTTNPVATEQYGSVSTNLQRGNRQAATADVNTQGVLPGMVWQDRDVYLQGPIWAKIPHTDGHFHPSPLMGGFGLKHPPPQILIKNTPVPANPSTTFSAAKFASFITQYSTGQVSVEIEWELQKENSKRWNPEIQYTSNYNKSVNVDFTVDTDGVYSEPRPIGTRYLTRNL

SEQ ID NO: 1786 - protein, 735 aa, Artificial Sequence
  Synthetic Polypeptide
MAADGYLPDWLEDTLSEGIRQWWKLKPGPPPPKPAERHKDDSRGLVLPGYKYLGPFNGLDKGEPVNEADAAALEHDKAYDRQLDSGDNPYLKYNHADAEFQERLKEDTSFGGNLGRAVFQAKKRVLEPLGLVEEPVKTAPGKKRPVEHSPVEPDSSSGTGKAGQQPARKRLNFGQTGDADSVPDPQPLGQPPAAPSGLGTNTMATGSGAPMADNNEGADGVGNSSGNWHCDSTWMGDRVITTSTRTWALPTYNNHLYKQISSQSGASNDNHYFGYSTPWGYFDFNRFHCHFSPRDWQRLINNNWGFRPKRLNFKLFNIQVKEVTQNDGTTTIANNLTSTVQVFTDSEYQLPYVLGSAHQGCLPPFPADVFMVPQYGYLTLNNGSQAVGRSSFYCLEYFPSQMLRTGNNFTFSYTFEDVPFHSSYAHSQSLDRLMNPLIDQYLYYLSRTNTPSGTTTQSRLQFSQAGASDIRDQSRNWLPGPCYRQQRVSKTSADNNNSEYSWTGATKYHLNGRDSLVNPGPAMASHKDDEEKFFPQSGVLIFGKQGSEKTNVDIEKVMITDEEEIRTTNPVATEQYGSVSTNLQRGNRQAATADVNTQGVLPGMVWQGRDVYLQGPIWAKIPHTDGHFHPSPLMGGFGLKHPPPQILIKNTPVPANPSTTFSAAKFASFITQYSTGQVSVEIEWELQKENSKRWNPEIQYTSNYNKSVNVDFTVDTNGVYSEPRPIGTRYLTRNL

SEQ ID NO: 1787 - protein, 735 aa, Artificial Sequence
  Synthetic Polypeptide
MAADGYLPDWLEDTLSEGIRQWWKLKPGPPPPKPAERHKDDSRGLVLPGYKYLGPFNGLDKGEPVNEADAAALEHDKAYDRQLDSGDNPYLKYNHADAEFQERLKEDTSFGGNLGRAVFQAKKRVLEPLGLVEEPVKTAPGKKGPVEHSPVEPDSSSGTGKAGQQPARKRLNFGQTGDADSVPDPQPLGQPPAAPSGLGTNTMATGSGAPMADNNEGADGVGNSSGNWHCDSTWMGDRVITTSTRTWALPTYNNHLYKQISSQSGASNDNHYFGYSTPWGYFDFNRFHCHFSPRDWQRLINNNWGFRPKRLNFKLFNIQVKEVTQNDGTTTIANNLTSTVQVFTDSEYQLPYVLGSAHQGCLPPFPADVFMVPQYGYLTLNNGSQAVGRSSFYCLEYFPSQMLRTGNNFTFSYTFEDVPFHSSYAHSQSLDRLMNPLIDQYLYYLSRTNTPSGTTTQSRLQFSQAGASDIRDQSRNWLPGPCYRQQRVSKTSADNNNSEYSWTGATKYHLNGRDSLVNPGPAMAGHKDDEEKFFPQSGVLIFGKQGSEKTNVDIEKVMITDEEEIRTTNPVATEQYGSVSTNLQRGNRQAATADVNTQGVLPGMVWQDRDVYLQGPIWAKIPHTDGHFHPSPLMGGFGLKHPPPQILIKNTPVPANPSTTFSAAKFASFITQYSTGQVSVEIEWELQKENSKRWNPEIQYTSNYNKSVNVDFTVDTNGVYSEPRPIGTRYLTRNL

SEQ ID NO: 1788 - protein, 735 aa, Artificial Sequence
  Synthetic Polypeptide
MAADGYLPDWLEDTLSEGIRQWWKLKPGPPPPKPAERHKDDSRGLVLPGYKYLGPFNGLDKGEPVNEADAAALEHDKAYDRQLDSGDNPYLKYNHADAEFQERLKEDTSFGGNLGRAVFQAKKRVLEPLGLVEEPVKTAPGKKRLVEHSPVEPDSSSGTGKAGQQPARKRLNFGQTGDADSVPDPQPLGQPPAAPSGLGTNTMATGSGAPMADNNEGADGVGNSSGNWHCDSTWMGDRVITTSTRTWALPTYNNHLYKQISSQSGASNDNHYFGYSTPWGYFDFNRFHCHFSPRDWQRLINNNWGFRPKRLNFKLFNIQVKEVTQNDGTTTIANNLTSTVQVFTDSEYQLPYVLGSAHQGCLPPFPADVFMVPQYGYLTLNNGSQAVGRSSFYCLEYFPSQMLRTGNNFTFSYTFEDVPFHSSYAHSQSLDRLMNPLIDQYLYYLSRTNTPSGTTTQSRLQFSQAGASDIRDQSRNWLPGPCYRQQRVSKTSADNNNSEYSWTGATKYHLNGRDSLVNPGPAMASHKDDEEKFFPQSGVLIFGKQGSEKTNVDIEKVMITDEEEIRTTNPVATEQYGSVSTNLQRGNRQAATADVNTQGVLPGMVWQDRDVYLQGPIWAKIPHTDGHFHPSPLMGGFGLKHPPPQILIKNTPVPANPSTTFSAAKFASFITQYSTGQVSVEIEWELQKENSKRWNPEIQYTSNYNKSVNVDFTVDTNGVYSEPRPIGTRYLTRNL

SEQ ID NO: 1789 - protein, 735 aa, Artificial Sequence
  Synthetic Polypeptide
MAADGYLPDWLEDTLSEGIRQWWKLKPGPPPPKPAERHKDDSRGLVLPGYKYLGPFNGLDKGEPVNEAGAAALKHDKAYDRQLDSGDNPYLKYNHADAEFQERLKEDTSFGGNLGRAVFQAKKRVLEPLGLVEEPVKTAPGKKRPVEHSPVEPDSSSGTGKAGQQPARKRLNFGQTGDADSVPDPQPLGQPPAAPSGLGTNTMATGSGAPMADNNEGADGVGNSSGNWHCDSTWMGDRVITTSTRTWALPTYNNHLYKQISSQSGASNDNHYFGYSTPWGYFDFNRFHCHFSPRDWQRLINNNWGFRPKRLNFKLFNIQVKEVTQNDGTTTIANNLTSTVQVFTDSEYQLPYVLGSAHQGCLPPFPADVFMVPQYGYLTLNNGSQAVGRSSFYCLEYFPSQMLRTGNNFTFSYTFEDVPFHSSYAHSQSLDRLMNPLIDQYLYYLSRTNTPSGTTTQSRLQFSQAGASDIRDQSRNWLPGPCYRQQRVSKTSADNNNSEYSWTGATKYHLNGRDSLVNPGPAMASHKDDEEKFFPQSGVLIFGKQGSEKTNVDIEKVMITDEEEIRTTNPVATEQYGSVSTNLQRGNRQAATADVNTQGVLPGMVWQDRDVYLQGPIWAKIPHTDGHFHPSPLMGGFGLKHPPPQILIKNTPVPANPSTTFSAAKFASFITQYSTGQVSVEIEWELQKENSKRWNPEIQYTSNYNKSVNVDFTVDTNGVYSEPRPIGTRYLTRNL

SEQ ID NO: 1790 - protein, 735 aa, Artificial Sequence
  Synthetic Polypeptide
MAADGYLPDWLEDTLSEGIRQWWKLKPGPPPPKPAERHKDDSRGLVLPGYKYLGPFNGLDKGEPVNEADAAALEHDKAYDRQLDSGDNPYLKYNHADAEFQERLKEDTSFGGNLGRAVFQAKKRVLEPLGLVEEPVKTAPGKKRPVEHSPVEPDSSSGTGKAGQQPARKRLNFGQTGDADSVPDPQPLGQPPAAPSGLGTNTMATGSGAPMADNNEGADGVGNSSGNWHCDSTWMGDRVITTSTRTWALPTYNNHLYKQISSQSGASNDNHYFGYSTPWGYFDFNRFHCHFSPRDWQRLINNNWGFRPKRLNFKLFNIQVKEVTQNDGTTTIANNLTSTVQVFTDSEYQLPYVLGSAHQGCLPPFPADVFMVPQYGYLTLNNGSQAVGRSSFYCLEYFPSQMLRTGNNFTFSYTFEDVPFHSSYAHSQSLDRLMNPLIDQYLYYLSRTNTPSGTTTQSRLQFSQAGASGIRDQSRNWLPGPCYRQQRVSKTSADNNNSEYSWTGATKYHLNGRDSLVNPGPAMASHKDDEEKFFPQSGVLIFGKQGSEKTNVDIEKVMITDEEEIRTTNPVATEQYGSVSTNLQRGNRQAATADVNTQGVLPGMVWQDRDVYLQGPIWAKIPHTDGHFHPSPLMGGFGLKHPPPQILIKNTPVPANPSTTFSAAKFASFITQYSTGQVSVEIEWELQKENSKRWNPEIQYTSNYNKSVNVDFTVDTNGVYSEPRPIGTRYLTRNL

SEQ ID NO: 1791 - protein, 735 aa, Artificial Sequence
  Synthetic Polypeptide
MAADGYLPDWLEDTLSEGIRQWWKLKPGPPPPKPAERHKDDSRGLVLPGYKYLGPFNGLDKGEPVNEADAAALEHDKAYDRQLDSGDNPYLKYNHADAEFQERLKEDTSFGGNLGRAVFQAKKRVLEPLGLVEEPVKTAPGKKRPVEHSPVEPDSSSGTGKAGQQPARKRLNFGQTGDADSVPDPQPLGQPPAAPSGLGTNTMATGSGAPMADNNEGADGVGNSSGNWHCDSTWMGDRVITTSTRTWALPTYNNHLYKQISSQSGASNDNHYFGYSTPWGYFDFNRFHCHFSPRDWQRLINNNWGFRPKRLNFKLFNIQVKEVTQNDGTTTIANNLTSTVQVFTDSEYQLPYVLGSAHQGCLPPFPADVFMVPQYGYLTLNNGSQAVGRSSFYCLEYFPSQMLRTGNNFTFSYTFEDVPFHSSYAHSQSLDRLMNPLIDQYLYYLSRANTPSGTTTQSRLQFSQAGASDIRDQSRNWLPGPCYRQQRVSKTSADNNNSEYSWTGATKYHLNGRDSLVNPGPAMASHKDDEEKFFPQSGVLIFGKQGSEKTNVDIEKVMITDEEEIRTTNPVATEQYGSVSTNLQRGNRQAATADVNTQGVLPGMVWQDRDVYLQGPIWAKIPHTDGHFHPSPLMGGFGLKHPPPQILIKNTPVPANPSTTFSAAKFASFITQYSTGQVSVEIEWELQKENSKRWNPEIQYTSNYNKSVNVDFTVDTNGVYSEPRPIGTRYLTRNL

SEQ ID NO: 1792 - protein, 735 aa, Artificial Sequence
  Synthetic Polypeptide
MAADGYLPDWLEDTLSEGIRQWWKLKPGPPPPKPAERHKDDSRGLVLPGYKYLGPFNGLDKGEPVNEADAAALEHDKAYDRQLDSGDNPYLKYNHADAEFQERLKEDTSFGGNLGRAVFQAKKRVLEPLGLVEEPVKTAPGKKRPVEHSPVEPDSSSGTGKAGQQPARKRLNFGQTGDADSVPDPQPLGQPPAAPSGLGTNTMATGSGAPMADNNEGADGVGNSSGNWHCDSTWMGDRVITTSTRTRALPTYNNHLYKQISSQSGASNDNHYFGYSTPWGYFDFNRFHCHFSPRDWQRLINNNWGFRPKRLNFKLFNIQVKEVTQNDGTTTIANNLTSTVQVFTDSEYQLPYVLGSAHQGCLPPFPADVFMVPQYGYLTLNNGSQAVGRSSFYCLEYFPSQMLRTGNNFTFSYTFEDVPFHSSYAHSQSLDRLMNPLIDQYLYYLSRTNTPSGTTTQSRLQFSQAGASDIRDQSRNWLPGPCYRQQRVSKTSADNNNSEYSWTGATKYHLNGRDSLVNPGPAMASHKDDEEKFFPQSGVLIFGKQGSEKTNVDIEKVMITDEEEIRTTNPVATEQYGSVSTNLQRGNRQAATADVNTQGVLPGMVWQDRDVYLQGPIWAKIPHTDGHFHPSPLMGGFGLKHPPPQILIKNTPVPANPSTTFSAAKFASFITQYSTGQVSVEIEWELQKENSKRWNPEIQYTSNYNKSVNVDFTVDTNGVYSEPRPIGTRYLTRNL

SEQ ID NO: 1793 - protein, 735 aa, Artificial Sequence
  Synthetic Polypeptide
MAADGYLPDWLEDTLSEGIRQWWKLKPGPPPPKPAERHKDDSRGLVLPGYKYLGPFNGLDKGEPVNEADAAALEHDKAYDRQLDSGDNPYLKYNHADAEFQERLKEDTSFGGNLGRAVFQAKKRVLEPLGLVEEPVKTAPGKKRPVEHSPVEPDSSSGTGKAGQQPARKRLNFGQTGDADSVPDPQPLGQPPAAPSGLGTNTMATGSGAPMADNNEGADGVGNSSGNWHCDSTWMGDRVITTSTRTWALPTYNSHLYKQISSQSGASNDNHYFGYSTPWGYFDFNRFHCHFSPRDWQRLINNNWGFRPKRLNFKLFNIQVKEVTQNDGTTTIANNLTSTVQVFTDSEYQLPYVLGSAHQGCLPPFPADVFMVPQYGYLTLNNGSQAVGRSSFYCLEYFPSQMLRTGNNFTFSYTFEDVPFHSSYAHSQSLDRLMNPLIDQYLYYLSRTNTPSGTTTQSRLQFSQAGASDIRDQSRNWLPGPCYRQQRVSKTSADNNNSEYSWTGATKYHLNGRDSLVNPGPAMASHKDDEEKFFPQSGVLIFGKQGSEKTNVDIEKVMITDEEEIRTTNPVATEQYGSVSTNLQRGNRQAATADVNTQGVLPGMVWQDRDVYLQGPIWAKIPHTDGHFHPSPLMGGFGLKHPPPQILIKNTPVPANPSTTFSAAKFASFITQYSTGQVSVEIEWELQKENSKRWNPEIQYTSNYNKSVNVDFTVDTNGVYSEPRPIGTRYLTRNL

SEQ ID NO: 1794 - protein, 735 aa, Artificial Sequence
  Synthetic Polypeptide
MAADGYLPDWLEDTLSEGIRQWWKLKPGPPPPKPAERHKDDSRGLVLPGYKYLGPFNGLDKGEPVNEADAAALEHDKAYDRQLDSGDNPYLKYNHADAEFQERLKEDTSFGGNLGRAVFQAKKRVLEPLGLVEEPVKTAPGKKRPVEHSPVEPDSSSGTGKAGQQPARKRLNFGQTGDADSVPDPQPLGQPPAAPSGLGTNTMATGSGAPMADNNEGADGVGNSSGNWHCDSTWMGDRVITTSTRTWALPTYNNHLYKQISSQSGASNDNHYFGYSTPWGYFDFNRFHCHFSPRDWQRLINNNWGFRPKRLNFKLFNIQVKEVTQNDGTTTIANNLTSTVQVFTDSEYQLPYVLGSAHQGCLPPFPADVFMVPQYGYLTLNNGSQAVGRSSFYCLEYFPSQMLRTGNNFTFSYTFEDVPFHSSYAHSQSLDRLMNPLIDQYLYYLSRTNTPSGTTTQSRLQFSQAGASDIRDQSRNWLPGPCYRQQRVSKTSADNNNSEYSWTGATKYHLNGRDSLVNPGPAMASHKDDEEKFFPQSGVLIFGKQGSEKTNVDIEKVMITDEEEIRTTNPVATEQYGSVSTNLQRGNRQAATADVNTQGVLPGMVWQDRDVYLQGPIWAKIPHTDGHFHPSPLMGGFGLKRPPPQILIKNTPVPANPSTTFSAAKFASFITQYSTGQVSVEIEWELQKENSKRWNPEIQYTSNYNKSVNVDFTVDTNGVYSEPRPIGTRYLTRNL

SEQ ID NO: 1795 - protein, 735 aa, Artificial Sequence
  Synthetic Polypeptide
MAADGYLPDWLEDTLSEGIRQWWKLKPGPPPPKPAERHKDDSRGLVLPGYKYLGPFNGLDKGEPVNEADAAALEHDKAYDRQLDSGDNPYLKYNHADAEFQERLKEDTSFGGNLGRAVFQAKKRVLEPLGLVEEPVKTAPGKKRPVEHSPVEPDSSSGTGKAGQQPARKRLNFGQTGDADSVPDPQPLGQPPAAPSGLGTNTMATGSGAPMADNNEGADGVGNSSGNWHCDSTWMGDRVITTSTRTWALPTYNNHLYKQISSQSGASNDNHYFGYSTPWGYFDFNRFHCHFSPRDWQRLINNNWGFRPKRLNFKLFNIQVKEVTQNDGTTTIANNLTSTVQVFTDSEYRLPYVLGSAHQGCLPPFPADVFMVPQYGYLTLNNGSQAVGRSSFYCLEYFPSQMLRTGNNFTFSYTFEDVPFHSSYAHSQSLDRLMNPLIDQYLYYLSRTNTPSGTTTQSRLQFSQAGASDIRDQSRNWLPGPCYRQQRVSKTSADNNNSEYSWTGATKYHLNGRDSLVNPGPAMASHKDDEEKFFPQSGVLIFGKQGSEKTNVDIEKVMITDEEEIRTTNPVATEQYGSVSTNLQRGNRQAATADVNTQGVLPGMVWQDRDVYLQGPIWAKIPHTDGHFHPSPLMGGFGLKHPPPQILIKNTPVPANPSTTFSAAKFASFITQYSTGQVSVEIEWELQKENSKRWNPEIQYTSNYNKSVNVDFTVDTNGVYSEPRPIGTRYLTRNL

SEQ ID NO: 1796 - protein, 735 aa, Artificial Sequence
  Synthetic Polypeptide
MAADGYLPDWLEDTLSEGIRQWWKLKPGPPPPKPAERHKDDSRGLVLPGYKYLGPFNGLDKGEPVNEADAAALEHDKAYDRQLDSGDNPYLKYNHADAEFQERLKEDTSFGGNLGRAVFQAKKRVLEPLGLVEEPVKTAPGKKRPVEHSPVEPDSSSGTGKAGQQPARKRLNFGQTGDADSVPDPQPLGQPPAAPSGLGTNTMATGSGAPMADNNEGADGVGNSSGNWHCDSTWMGDRVITTSTRTWALPTYNNHLYKQISSQSGASNDNHYFGYSTPWGYFDFNRFHCHFSPRDWQRLINNNWGFRPKRLNFKLFNIQVKEVTQNDGTTTIANNLTSTVRVFTDSEYQLPYVLGSAHQGCLPPFPADVFMVPQYGYLTLNNGSQAVGRSSFYCLEYFPSQMLRTGNNFTFSYTFEDVPFHSSYAHSQSLDRLMNPLIDQYLYYLSRTNTPSGTTTQSRLQFSQAGASDIRDQSRNWLPGPCYRQQRVSKTSADNNNSEYSWTGATKYHLNGRDSLVNPGPAMASHKDDEEKFFPQSGVLIFGKQGSEKTNVDIEKVMITDEEEIRTTNPVATEQYGSVSTNLQRGNRQAATADVNTQGVLPGMVWQDRDVYLQGPIWAKIPHTDGHFHPSPLMGGFGLKHPPPQILIKNTPVPANPSTTFSAAKFASFITQYSTGQVSVEIEWELQKENSKRWNPEIQYTSNYNKSVNVDFTVDTNGVYSEPRPIGTRYLTRNL

SEQ ID NO: 1797 - protein, 735 aa, Artificial Sequence
  Synthetic Polypeptide
MAADGYLPDWLEDTLSEGIRQWWKLKPGPPPPKPAERHRDDSRGLVLPGYKYLGPFNGLDKGEPVNEADAAALEHDKAYDRQLDSGDNPYLKYNHADAEFQERLKEDTSFGGNLGRAVFQAKKRVLEPLGLVEEPVKTAPGKKRPVEHSPVEPDSSSGTGKAGQQPARKRLNFGQTGDADSVPDPQPLGQPPAALSGLGTNTMATGSGAPMADNNEGADGVGNSSGNWHCDSTWMGDRVITTSTRTWALPTYNNHLYKQISSQSGASNGNHYFGYSTPWGYFDFNRFHCHFSPRDWQRLINNNWGFRPKRLNFKLFNIQVKEVTQNDGTTTIANNLTSTVQVFTDSEYQLPYVLGSAHQGCLPPFPADVFMVPQYGYLTLNNGSQAVGRSSFYCLEYFPSQMLRTGNNFTFSYTFEDVPFHSSYAHSQSLDRLMNPLIDQYLYYLSRTNTPSGTTTQSRLQFSQAGASDIRDQSRNWLPGPCYRQQRVSKTSADNNNSEYSWTGATKYHLNGRDSLVNPGPAMASHKDDEEKFFPQSGVLIFGKQGSEKTNVDIEKVMITDEEEIRTTNPVATEQYGSVSTNLQRGNRQAATADVNTQGVLPGMVWQDRDVYLQGPIWAKIPHTDGHFHPSPLMGGFGLKHPPPQILIKNTPVPANPSTTFSAAKFASFITQYSTGQVSVEIEWELQKENSKRWNPEIQYTSNYNKSVNVDFTVDTNGVYSEPRPIGTRYLTRNL

SEQ ID NO: 1798 - protein, 735 aa, Artificial Sequence
  Synthetic Polypeptide
MAADGYLPDWLEDTLSEGIRQWWKLKPGPPPPKPAERHRDDSRGLVLPGYKYLGPFNGLDKGEPVNEADAAALEHDKAYDRQLDSGDNPYLKYNHADAEFQERLKEDTSFGGNLGRAVFQAKKRVLEPLGLVGEPVKTAPGKKRPVEHSPVEPDSSSGTGKAGQQPARKRLNFGQTGDADSVPDPQPLGQPPAAPSGLGTNTMATGSGAPMADNNEGADGVGNSSGNWHCDSTWMGDRVITTSTRTWALPTYNNHLYKQISSQSGASNGNHYFGYSTPWGYFDFNRFHCHFSPRDWQRLINNNWGFRPKRLNFKLFNIQVKEVTQNDGTTTIANNLTSTVQVFTDSEYQLPYVLGSAHQGCLPPFPADVFMVPQYGYLTLNNGSQAVGRSSFYCLEYFPSQMLRTGNNFTFSYTFEDVPFHSSYAHSQSLDRLMNPLIDQYLYYLSRTNTPSGTTTQSRLQFSQAGASDIRDQSRNWLPGPCYRQQRVSKTSADNNNSEYSWTGATKYHLNGRDSLVNPGPAMASHKDDEEKFFPQSGVLIFGKQGSEKTNVDIEKVMITDEEEIRTTNPVATEQYGSVSTNLQRGNRQAATADVNTQGVLPGMVWQDRDVYLQGPIWAKIPHTDGHFHPSPLMGGFGLKHPPPQILIKNTPVPANPSTTFSAAKFASFITQYSTGQVSVEIEWELQKENSKRWNPEIQYTSNYNKSVNVDFTVDTNGVYSEPRPIGTRYLTRNL

SEQ ID NO: 1799 - protein, 735 aa, Artificial Sequence
  Synthetic Polypeptide
MAADGYLPDWLEDTLSEGIRQWWKLKPGPPPPKPAERHRDDSRGLVLPGYKYLGPFNGLDKGEPVNEADAAALEHDKAYDRQLDSGDNPYLKYNHADAEFQERLKEDTSFGGNLGRAVFQAKKRVLEPLGLVEEPVKTAPGKKRPVEHSPVEPDSSSGTGKAGQQPARKRLNFGQTGDADSVPDPQPLGQPPAAPSGLGTNTMATGSGAPMADNNEGADGVGNSSGNWHYDSAWMGDRVITTSTRTWALPTYNNHLYKQISSQSGASNGNHYFGYSTPWGYFDFNRFHCHFSPRDWQRLINNNWGFRPKRLNFKLFNIQVKEVTQNDGTTTIANNLTSTVQVFTDSEYQLPYVLGSAHQGCLPPFPADVFMVPQYGYLTLNNGSQAVGRSSFYCLEYFPSQMLRTGNNFTFSYTFEDVPFHSSYAHSQSLDRLMNPLIDQYLYYLSRTNTPSGTTTQSRLQFSQAGASDIRDQSRNWLPGPCYRQQRVSKTSADNNNSEYSWTGATKYHLNGRDSLVNPGPAMASHKDDEEKFFPQSGVLIFGKQGSEKTNVDIEKVMITDEEEIRTTNPVATEQYGSVSTNLQRGNRQAATADVNTQGVLPGMVWQDRDVYLQGPIWAKIPHTDGHFHPSPLMGGFGLKHPPPQILIKNTPVPANPSTTFSAAKFASFITQYSTGQVSVEIEWELQKENSKRWNPEIQYTSNYNKSVNVDFTVDTNGVYSEPRPIGTRYLTRNL

SEQ ID NO: 1800 - protein, 735 aa, Artificial Sequence
  Synthetic Polypeptide
MAADGYLPDWLEDTLSEGIRQWWKLKPGPPPPKPAERHRDDSRGLVLPGYKYLGPFNGLDKGEPVNEADAAALEHDKAYDRQLDSGDNPYLKYNHADAEFQERLKEDTSFGGNLGRAVFQAKKRVLEPLGLVEEPVKTAPGKKRPVEHSPVEPDSSSGTGKAGQQPARKRLNFGQTGDADSVPDPQPLGQPPAAPSGLGTNTMATGSGAPMADNNEGADGVGNSSGNWHCDSTWMGDRVITTSTRTWALPTYNNHLYKQISSQSGASNGNHYFGYSTPWGYFDFNRFHCHFSPRDWQRLINNNWGFRPKRLNFKLFNIQVKEVTQNDGTTTIANNLTSTVQVFTDSEYQLPYVLGSAHQGCLPPFPADVFMVPQYGYLTLNNGSQAVGRSSFYCLEYFPSQMLRTGNNFTFSYTFEDVPFHSSYAHSQSLDRLMNPLIDQYLYYLSRTNTPSGTTTQSRLQFSQAGASDIRDQSRNWLPGPCYRQQRVSKTSADNNNSEYSWTGATKYHLNGRDSLVNPGPAMASHKDDEEKFFPQSGVLIFGKQGSEKTNVDIEKVMITDEEEIRTTNPVATEQYGSVSTNLQRGNRQAATADVNTQGVLPGMVWQDRDVYLQGPIWAKIPHTDGHFHPSPLMGGFGLKHPPPQILIKNTPVPANPSTTFSAAKFASFIAQYSTGQVSVEIEWELQKENSKRWNPEIQYTSNYNKSVNVDFTVDTNGVYSEPRPIGTRYLTRNL

SEQ ID NO: 1801 - protein, 735 aa, Artificial Sequence
  Synthetic Polypeptide
MAADGYLPDWLEDTLSEGIRQWWKLKPGPPPPKPAERHRDDSRGLVLPGYKYLGPFNGLDKGEPVNEADAAALEHDKAYDRQLDSGDNPYLKYNHADAEFQERLKEDTSFGGNLGRAVFQAKKRVLEPLGLVEEPVKTAPGKKRPVEHSPVEPDSSSGTGKAGQQPARKRLNFGQTGDADSVPDPQPLGQPPAAPSGLGTNTMATGSGAPMADNNEGADGVGNSSGNWHCDSTWMGDRVITTSTRTWALPTYNNHLYKQISSQSGASNGNHYFGYSTPWGYFDFNRFHCHFSPRDWQRLINNNWGFRPKRLNFKLFNIQVKEVTQNDGTTTIANNLTSTVQVFTDSEYQLPYVLGSAHQGCLPPFPADVFMVPQYGYLTLNNGSQAVGRSSFYCLEYFPSQMLRTGNNFTFSYTFEDVPFHSSYAHSQSLDRLMNPLIDQYPYYLSRTNTPSGTTTQSRLQFSQAGASDIRDQSRNWLPGPCYRQQRVSKTSADNNNSEYSWTGATKYHLNGRDSLVNPGPAMASHKDDEEKFFPQSGVLIFGKQGSEKTNVDIEKVMITDEEEIRTTNPVATEQYGSVSTNLQRGNRQAATADVNTQGVLPGMVWQDRDVYLQGPIWAKIPHTDGHFHPSPLMGGFGLKHPPPQILIKNTPVPANPSTTFSAAKFASFITQYSTGQVSVEIEWELQKENSKRWNPEIQYTSNYNKSVNVDFTVDTNGVYSEPRPIGTRYLTRNL

SEQ ID NO: 1802 - protein, 735 aa, Artificial Sequence
  Synthetic Polypeptide
MAADGYLPDWLEDTLSEGIRQWWKLKPGPPPPKPAERHRDDSRGLVLPGYKYLGPFNGLDKGEPVNEADAAALEHDKAYDRQLDSGDNPYLKYNHADAEFQERLKEDTSFGGNLGRAVFQAKKRVLEPLGLVEEPVKTAPGKKRPVEHSPVEPDSSSGTGKAGQQPARKRLNFGQTGDADSVPDPQPLGQPPAAPSGLGTNTMATGSGAPMADNNEGADGVGNSSGNWHCDSTWMGDRVITTSTRTWALPTYNNHLYKQISSQSGASNGNHYFGYSTPWGYFDFNRFHCHFSPRDRQRLINNNWGFRPKRLNFKLFNIQVKEVTQNDGTTTIANNLTSTVQVFTDSEYQLPYVLGSAHQGCLPPFPADVFMVPQYGYLTLNNGSQAVGRSSFYCLEYFPSQMLRTGNNFTFSYTFEDVPFHSSYAHSQSLDRLMNPLIDQYLYYLSRTNTPSGTTTQSRLQFSQAGASDIRDQSRNWLPGPCYRQQRVSKTSADNNNSEYSWTGATKYHLNGRDSLVNPGPAMASHKDDEEKFFPQSGVLIFGKQGSEKTNVDIEKVMITDEEEIRTTNPVATEQYGSVSTNLQRGNRQAATADVNTQGVLPGMVWQDRDVYLQGPIWAKIPHTDGHFHPSPLMGGFGLKHPPPQILIKNTPVPANPSTTFSAAKFASFITQYSTGQVSVEIEWELQKENSKRWNPEIQYTSNYNKSVNVDFTVDTNGVYSEPRPIGTRYLTRNL

SEQ ID NO: 1803 - protein, 735 aa, Artificial Sequence
  Synthetic Polypeptide
MAADGYLPDWLEDTLSEGIRQWWKLKPGPPPPKPAERHRDDSRGLVLPGYKYLGPFNGLDKGEPVNEADAAALEHDKAYDRQLDSGDNPYLKYNHADAEFQERLKEDTSFGGNLGRAVFQAKKRVLEPLGLVEEPVKTAPGKKRPVEHSPVEPDSSSGTGKAGQQPARKRLNFGQTGDADSVPDPQPLGQPPAAPSGLGTNTMATGSGAPMADNNEGADGVGNSSGNWHCDSTWMGDRVITTSTRTWALPTYNNHLYKQISSQSGASNGNHYFGYSTPWGYFDFNRFHCHFSPRDWQRLINNNWGFRPKRLNFKLFNIQVKEVTQNDGTTTIANNLTSTVQVFTDSEYQLPYVLGSAHQGCLPPFPADVFMVPQYGYLTLNNGSQAVGRSSFYCLEYFPSQMLRTGNNFTFSYTFEDVPFHSSYAHSQSLDRLMNPLIDQYLYYLSRTNTPSGTTTQSRLQFSQAGASDIRDQSRNWLPGPCYRQQRVSKTSADNNNSEYSWTGATKYHLNGRDSLVNPGPAMASHKDDEEKFFPQSGVLIFGKQGSEKTNVDIEKVMITDEEEIRTTNPVATEQYGSVSTNLQRGNRQAATADVNTQGVLPGMVWQDRDVYLQGPIWAKIPHTDGHFHPSPLMGGFGLKHPPPQILIKNTPVPANPSTTFSAAKFASFITQYSTGQVSVEIEWELQKENSKRWNPEIQYTSNYNKSVNVDLTVDTNGVYSEPRPIGTRYLTRNL

SEQ ID NO: 1804 - protein, 735 aa, Artificial Sequence
  Synthetic Polypeptide
MAADGYLPDWLEDTLSEGIRQWWKLKPGPPPPKPAERHRDDSRGLALPGYKYLGPFNGLDKGEPVNEADAAALEHDKAYDRQLDSGDNPYLKYNHADAEFQERLKEDTSFGGNLGRAVFQAKKRVLEPLGLVEEPVKTAPGKKRPVEHSPVEPDSSSGTGKAGQQPARKRLNFGQTGDADSVPDPQPLGQPPAAPSGLGTNTMATGSGAPMADNNEGADGVGNSSGNWHCDSTWMGDRVITTSTRTWALPTYNNHLYKQISSQSGASNGNHYFGYSTPWGYFDFNRFHCHFSPRDWQRLINNNWGFRPKRLNFKLFNIQVKEVTQNDGTTTIANNLTSTVQVFTDSEYQLPYVLGSAHQGCLPPFPADVFMVPQYGYLTLNNGSQAVGRSSFYCLEYFPSQMLRTGNNFTFSYTFEDVPFHSSYAHSQSLDRLMNPLIDQYLYYLSRTNTPSGTTTQSRLQFSQAGASDIRDQSRNWLPGPCYRQQRVSKTSADNNNSEYSWTGATKYHLNGRDSLVNPGPAMASHKDDEEKFFPQSGVLIFGKQGSEKTNVDIEKVMITDEEEIRTTNPVATEQYGSVSTNLQRGNRQAATADVNTQGVLPGMVWQDRDVYLQGPIWAKIPHTDGHFHPSPLMGGFGLKHPPPQILIKNTPVPANPSTTFSAAKFASFITQYSTGQVSVEIEWELQKENSKRWNPEIQYTSNYNKSVNVDFTVDTNGVYSEPRPIGTRYLTRNL

SEQ ID NO: 1805 - protein, 735 aa, Artificial Sequence
  Synthetic Polypeptide
MAADGYLPDWLEDTLSEGIRQWWKLKPGPPPPKPAERHRDDSRGLVLPGYKYLGPFNGLDKGEPVNEADAAALEHDKAYDRQLDSGDNPYLKYNHADAEFQERLKEDTSFGGNLGRAVFQAKKRVLEPLGLVEEPVKTAPGKKRPVEHSPVEPDSSSGTGKAGQQPARKRLNFGQTGDADSVPDPQPLGQPPAAPSGLGTNTMATGSGAPMADNNEGADGVGNSSGNWHCDSTWMGDRVITTSTRTWALPTYNNHLYKQISSQSGASNGNHYFGYSTPWGYFDFNRFHCHFSPRDWQRLINNNWGFRPKRLNFKLFNIQVKEVTQNDGTTTIANNLTSTVQVFTDSEYQLPYVLGSAHQGCLPPFPADVFMVPQYGYLTLNNGSQAVGRSSFYCLEYFPSQMLRTGNNFTFSYTFEDVPFHSSYAHSQSLDRLMNPLIDQYLYYLSRTNTPSGTTTQSRLQFSQAGASDIRDQSRNWLPGPCYRQQRVSKTSADNNNSEYSWTGATKYHLNGRDSLVNPGPAMASHKDDEEKFFPQSGVLIFGKQGSEKTNVDIEKVMITDEEEIRTTNPVATEQYGSVSTNLQRGNRQAATADANTQGVLPGMVWQDRDVYLQGPIWAKIPHTDGHFHPSPLMGGFGLKHPPPQILIKNTPVPANPSTTFSAAKFASFITQYSTGQVSVEIEWELQKENSKRWNPEIQYTSNYNKSVNVDFTVDTNGVYSEPRPIGTRYLTRNL

SEQ ID NO: 1806 - protein, 735 aa, Artificial Sequence
  Synthetic Polypeptide
MAADGYLPDWLEDTLSEGIRQWWKLKPGPPPPKPAERHRDDSRGLVLPGYKYLGPFNGLDKGEPVNEADAAALEHDKAYDRQLDSGDNPYLKYNHADAEFQERLKEDTSFGGNLGRAVFQAKKRVLEPLGLVEEPVKTAPGKKRPVEHSPVEPDSSSGTGKAGQQPARKRLNFGQTGDADSVPDPQPLGQPPAAPSGLGTNTMATGSGAPMADNNEGADGVGNSSGNWHCDSTWMGDRVITTSTRTWALPTYNNHLYKQISSQSGASNGNHYFGYSTPWGYFDFNRFHCHFSPRDWQRLINNNWGFRPKRLNFKLFNIQVKEVTQNDGTTTIANNLTSTVQVFTDSEYQLPYVLGSAHQGCLPPFPADVFMVPQYGYLTLNNGSQAVGRSSFYCLEYFPSQMLRTGNNFTFSYTFEDVPFHSSYAHSQSLDRLMNPLIDQYLYYLSRTNTPSGTTTQSRLQFSQAGASDIRDQSRNWLPGPCYRQQRVSKTSADNNNSEYSWTGATKYHLNGRDSLVNPGPAMASHKDDEEKFFPQSGVLIFGKQGSEKTNVDIEKVMITDEGEIRTTNPVATEQYGSVSTNLQRGNRQAATADVNTQGVLPGMVWQDRDVYLQGPIWAKIPHTDGHFHPSPLMGGFGLKHPPPQILIKNTPVPANPSTTFSAAKFASFITQYSTGQVSVEIEWELQKENSKRWNPEIQYTSNYNKSVNVDFTVDTNGVYSEPRPIGTRYLTRNL

SEQ ID NO: 1807 - protein, 735 aa, Artificial Sequence
  Synthetic Polypeptide
MAADGYLPDWLEDTLSEGIRQWWKLKPGPPPPKPAERHRDDSRGLVLPGYKYLGPFNGLDKGEPVNEADAAALEHDKAYDRQLDSGDNPYLKYNHADAEFQERLKEDTSFGGNLGRAVFQAKKRVLEPLGLVEEPVKTAPGKKRPVEHSPVEPDSSSGTGKAGQQPARKRLNFGQTGDADSVPDPQPLGQPPAAPSGLGTNTMATGSGAPMADNNEGADGVGNSSGNWHCDSTWMGDRVITTSTRTWALPTYNNHLYKQISSQSGASNGNHYFGYSTPWGYFDFNRFHCHFSPRDWQRLINNNWGFRPKRLNFKLFNIQVKEVTQNDGTTTIANNLTSTVQVFTDSEYQLPYVLGSAHQGCLPPFPADVFMVPQYGYLTLNNGSQAVGRSSFYCLEYFPSQMLRTGNNFTFSYTFEDVPFHSSYAHSQSLDRLMNPLIDQYLYYLSRTNTPSGTTTQSRLQFSQAGASDIRDQSRNWLPGPCYRQQRVSKTSADNNNSEYSWTGATKYHLNGRDSLVNPGPAMASHKDDEEKFFPQSGVLIFGKQGSEKTNVDIEKVMITDEEEIRTTNPVATEQYGSVSTNLQRGNRQAATADVNTQGVLPGMVWQDRDVYLQGPIWAKIPHTDGHFHPSPPMGGFGLKHPPPQILIKNTPVPANPSTTFSAAKFASFITQYSTGQVSVEIEWELQKENSKRWNPEIQYTSNYNKSVNVDFTVDTNGVYSEPRPIGTRYLTRNL

SEQ ID NO: 1808 - protein, 735 aa, Artificial Sequence
  Synthetic Polypeptide
MAADGYLPDWLEDTLSEGIRQWWKLKPGPPPPKPAERHRDDSRGLVLPGYKYLGPFNGLDKGEPVNEADAAALEHDKAYDRQLDSGDNPYLKYNHADAEFQERLKEDTSFGGNLGRAVFQAKKRVLEPLGLVEEPVKTAPGKKRPVEHSPVEPDSSSGTGKAGQQPARKRLNFGQTGDADSVPDPQPLGQPPAAPSGLGTNTMATGSGAPMADNNEGADGVGNSSGNWHCDSTWMGDRVITTSTRTWALPTYNNHLYKQISSQSGASNGNHYFGYSTPWGYFDFNRFHCHFSPRDWQRLINNNWGFRPKRLNFKLFNIQVKEVTQNDGTTTIANNLTSTVQVFTDSEYQLPYVLGSAHQGCLPPFPADVFMVPQYGYLTLNNGSQAVGRSSFYCLEYFPSQMLRTGNNFTFSYTFEDVPFHSSYAHSQSLDRLMNPLIDQYLYYLSRTNTPSGTTTQSRLQFSQAGASDIRDQSRNWLPGPCYRQQRVSKTSADNNNSEYSWTGATKYHLNGRDSLVNPGPAMASHKDDEEKFFPQSGVLIFGKQGSEKTNVDIEKVMITDEEEIRTTNPVATEQYGSVSTNLQRGNRQAATADVNTQGVLPGMVWQDRDVYLQGPIWAKIPHTDGHFHPSPLMGGFGLKHPPPQILIKNTPVPANPSTTFSAAKFASFITQYSTGQVSVEIEWELQKENSKRWNPEIQYTSDYNKSVNVDFTVDTNGVYSEPRPIGTRYLTRNL

SEQ ID NO: 1809 - protein, 735 aa, Artificial Sequence
  Synthetic Polypeptide
MAADGYLPDWLEDTLSEGIRQWWKLKPGPPPPKPAERHRDDSRGLVLPGYKYLGPFNGLDKGEPVNEADAAALEHDKAYDRQLDSGDNPYLKYNHADAEFQERLKEDTSFGGNLGRAVFQAKKRVLEPLGLVEEPVKTAPGKKRPVEHSPVEPDSSSGTGKAGQQPARKRLNFGQTGDADSVPDPQPLGQPPAAPSGLGTNTMATGSGAPMADNNEGADGVGNSSGNWHCDSTWMGDRVITTSTRTWALPTYNNHLYKQISSQSGASNGNHYFGYSTPWGYFDFNRFHCHFSPRDWQRLINNNWGFRPKRLNFKLFNIQVKEVTQNGGTTTIANNLTSTVQVFTDSEYQLPYVLGSAHQGCLPPFPADVFMVPQYGYLTLNNGSQAVGRSSFYCLEYFPSQMLRTGNNFTFSYTFEDVPFHSSYAHSQSLDRLMNPLIDQYLYYLSRTNTPSGTTTQSRLQFSQAGASDIRDQSRNWLPGPCYRQQRVSKTSADNNNSEYSWTGATKYHLNGRDSLVNPGPAMASHKDDEEKFFPQSGVLIFGKQGSEKTNVDIEKVMITDEEEIRTTNPVATEQYGSVSTNLQRGNRQAATADVNTQGVLPGMVWQDRDVYLQGPIWAKIPHTDGHFHPSPLMGGFGLKHPPPQILIKNTPVPANPSTTFSAAKFASFITQYSTGQVSVEIEWELQKENSKRWNPEIQYTSNYNKSVNVDFTVDTNGVYSEPRPIGTRYLTRNL

SEQ ID NO: 1810 - protein, 735 aa, Artificial Sequence
  Synthetic Polypeptide
MAADGYLPDWLEDTLSEGIRQWWKLKPGPPPPKPAERHRDDSRGLVLPGYKYLGPFNGLDKGEPVNEADAAALEHDKAYDRQLDSGDNPYLKYNHADAEFQERLKEDTSFGGNLGRAVFQAKKRVLEPLGLVEEPVKTAPGKKRPVEHSPVEPDSSSGTGKAGQQPARKRLNFGQTGDADSVPDPQPLGQPPAAPSGLGTNTMATGSGAPMADNNEGADGVGNSSGNWHCDSTWMGDRVITTSTRTWALPTYNNHLYKQISSQSGASNGNHYFGYSTPWGYFDFNRFHCHFSPRDWQRLINNNWGFRPKRLNFKLFNIQVKEVTQNDGTTTIANNLTSTVQVFTDSEYQLPYVLGSAHQGCLPPFPADVFMVPQYGYLTLNNGSQAVGRSSFYCLEYFPSQMLRTGNNFTFSYTFEDVPFHSSYAHSQSLDRLMNPLIDQYLYYLSRTNTPSGTTTQSRLQFSQAVASDVRDQSRNWLPGPCYRQQRVSKTSADNNNSEYSWTGATKYHLNGRDSLVNPGPAMASHKDDEEKFFPQSGVLIFGKQGSEKTNVDIEKVMITDEEEIRTTNPVATEQYGSVSTNLQRGNRQAATADVNTQGVLPGMVWQDRDVYLQGPIWAKIPHTDGHFHPSPLMGGFGLKHPPPQILIKNTPVPANPSTTFSAAKFASFITQYSTGQVSVEIEWELQKENSKRWNPEIQYTSNYNKSVNVDFTVDTNGVYSEPRPIGTRYLTRNL

SEQ ID NO: 1811 - protein, 735 aa, Artificial Sequence
  Synthetic Polypeptide
MAADGYLPDWLEDTLSEGIRQRWKLKPGPPPPKPAERHRDDSRGLVLPGYKYLGPFNGLDKGEPVNEADAAALEHDKAYDRQLDSGDNPYLKYNHADAEFQERLKEDTSFGGNLGRAVFQAKKRVLEPLGLVEEPVKTAPGKKRPVEHSPVEPDSSSGTGKAGQQPARKRLNFGQTGDADSVPDPQPLGQPPAAPSGLGTNTMATGSGAPMADNNEGADGVGNSSGNWHCDSTWMGDRVITTSTRTWALPTYNNHLYKQISSQSGASNGNHYFGYSTPWGYFDFNRFHCHFSPRDWQRLINNNWGFRPKRLNFKLFNIQVKEVTQNDGTTTIANNLTSTVQVFTDSEYQLPYVLGSAHQGCLPPFPADVFMVPQYGYLTLNNGSQAVGRSSFYCLEYFPSQMLRTGNNFTFSYTFEDVPFHSSYAHSQSLDRLMNPLIDQYLYYLSRTNTPSGTTTQSRLQFSQAGASDIRDQSRNWLPGPCYRQQRVSKTSADNNNSEYSWTGATKYHLNGRDSLVNPGPAMASHKDDEEKFFPQSGVLIFGKQGSEKTNVDIEKVMITDEEEIRTTNPVATEQYGSVSTNLQRGNRQAATADVNTQGVLPGMVWQDRDVYLQGPIWAKIPHTDGHFHPSPLMGGFGLKHPPPQILIKNTPVPANPSTTFSAAKFASFITQYSTGQVSVEIEWELQKENSKRWNPEIQYTSNYNKSVNVDFTVDTNGVYSEPRPIGTRYLTRNL

SEQ ID NO: 1812 - protein, 735 aa, Artificial Sequence
  Synthetic Polypeptide
MAADGYLPDWLEDTLSEGIRQWWKLKPGPPPPKPAERHKDDSRGLVLPGYKYLGPFNGLDKGEPVNEADAAALEHDKAYDRQLDSGDNPYLKYNHADAEFQERLKEDTSFGGNLGRAVFQAKKRVLEPLGLVEEPVKTAPGKKRPVEHSPVEPDSSSGTGKAGQQPARKRLNFGQTGDADSVPDPQPLGQPPAAPSGLGTNTMATGSGAPMADNNEGADGVGNSSGNWHCDSTWMGDRVITTSTRTWALPTYNNHLYKQISSQSGASNDNHYFGYSTPWGYFDFNRFHCHFSPRDWQRLINNNWGFRPKRLNFKLFNIQVKEVTQNDGTTTIANNLTSTVQVFTDSEYQLPYVLGSAHQGCLPPFPADVFMVPQYGYLTLNNGSQAVGRSSFYCLEYFPSQMLRTGNNFTFSYTFEDVPFHSSYAHSQSLDRLMNPLIDQYLYYLSRTNTPSGTTTQSRLQFSQAGASDIRDQSRNWLPGPCYRQQRVSKTSADNNNSEYSWTGATKYHLNGRDSLVNPGPAMASHKDDEEKFFPQSGVLIFGKQGSEKTNVDIEKVMTTDEEEIRTTNPVATEQYGSVSTNLQRGNRQAATADVNTQGVLPGMVWQDRDVYLQGPIWAKIPHTDGHFHPSPLMGGFGLKHPPPQILIKNTPVPANPSTTFSAAKFASFITQYSTGQVSVEIEWELQKENSKRWNPEIQYTSNYNKSVNVDFTVDTNGVYSEPRPIGTRYLTRNL

SEQ ID NO: 1813 - protein, 735 aa, Artificial Sequence
  Synthetic Polypeptide
MAADGYLPDWLEDTLSEGIRQWWKLKPGPPPPKPAERHKDDSRGLVLPGYKYLGPFNGLDKGEPVNEADAAALEHDKAYDRQLDSGDNPYLKYNHADAEFQERLKEDTSFGGNLGRAVFQAKKRVLEPPGLVEEPVKTAPGKKRPVEHSPVEPDSSSGTGKAGQQPARKRLNFGQTGDADSVPDPQPLGQPPAAPSGLGTNTMATGSGAPMADNNEGADGVGNSSGNWHCDSTWMGDRVITTSTRTWALPTYNNHLYKQISSQSGASNDNHYFGYSTPWGYFDFNRFHCHFSPRDWQRLINNNWGFRPKRLNFKLFNIQVKEVTQNDGTTTIANNLTSTVQVFTDSEYQLPYVLGSAHQGCLPPFPADVFMVPQYGYLTLNNGSQAVGRSSFYCLEYFPSQMLRTGNNFTFSYTFEDVPFHSSYAHSQSLDRLMNPLIDQYLYYLSRTNTPSGTTTQSRLQFSQAGASDIRDQSRNWLPGPCYRQQRVSKTSADNNNSEYSWTGATKYHLNGRDSLVNPGPAMASHKDDEEKFFPQSGVLIFGKQGSEKTNVDIEKVMTTDEEEIRTTNPVATEQYGSVSTNLQRGNRQAATADVNTQGVLPGMVWQDRDVYLQGPIWAKIPHTDGHFHPSPLMGGFGLKHPPPQILIKNTPVPANPSTTFSAAKFASFITQYSTGQVSVEIEWELQKENSKRWNPEIQYTSNYNKSVNVDFTVDTNGVYSEPRPIGTRYLTRNL

SEQ ID NO: 1814 - protein, 735 aa, Artificial Sequence
  Synthetic Polypeptide
MAADGYLPDWLEDTLSEGIRQWWKLKPGPPPPKPAERHKDDSRGLVLPGYKYLGPFNGLDKGEPVNEADAAALEHDKAYDRQLDSGDNPYLKYNHADAEFQERLKEDTSFGGNLGRAVFQAKKRVLEPLGLVEEPVKTAPGKKRPVEHSPVEPDSSSGTGKAGQQPARKRLNFGQTGDADSVPDPQPLGQPPAAPSGLGTNTMATGSGAPMADNNEGADGVGNSSGNWHCDSTWMGDRVITTSTRTWALPTYNNHLYKQISSQSGASNDNHYFGYSTPWGYFDFNRFHCHFSPRDWQRLINNNWGFRPKRLNFKLFNIQVKEVTQNDGTTTIANNLTSTVQVFTDSEYQLPYVLGSAHQGCLPPFPADVFMVPQYGYLTLNNGSQAVGRSSFYCLEYFPSQMLRTGNNFTFSYTFEDVPFHSSYAHSQSLDRLMNPLIDQYLYYLSRTNTPSGTTTQSRLQFSQAGASDIRDQSRNWLPGPCYRQQRVSKTSADNNNSEYSWTGATKYHLNGRDSLVNPGPAMASHKDDEEKFFPQSGVLIFGKQGSEKTNVDIEKVMTTDEEEIRTTNPVATEQYGSVSTNLQRGNRQAATADVNTQGVLPGMVWQDRDVYLQGPIWAKIPHTDGHFHPSPLMGGFGLKHPPPQILIKNTPVPANPSTTFSAAKFASFITQYSTGQVSVEIEWELQKENGKRWNPEIQYTSNYNKSVNVDFTVDTNGVYSEPRPIGTRYLTRNL

SEQ ID NO: 1815 - protein, 735 aa, Artificial Sequence
  Synthetic Polypeptide
MAADGYLPDWLEDTLSEGIRQWWKLKPGPPPPEPAERHKDDSRGLVLPGYKYLGPFNGLDKGEPVNEADAAALEHDKAYDRQLDSGDNPYLKYNHADAEFQERLKEDTSFGGNLGRAVFQAKKRVLEPLGLVEEPVKTAPGKKRPVEHSPVEPDSSSGTGKAGQQPARKRLNFGQTGDADSVPDPQPLGQPPAAPTSLGSTTMATGSGAPMADNNEGADGVGNSSGNWHCDSQWLGDRVITTSTRTWALPTYNNHLYKQISSQSGASNDNHYFGHSTPWGYFDFNRFHCHFSPRDWQRLINNNWGFRPKRLNFKLFNIQVKEVTQNDGTTTIANNLTSTVQVFTDSEYQLPYVLGSAHQGCLPPFPADVFMVPQYGYLTLNNGSQAVGRSSFYCLEYFPSQMLRTGNNFTFSYTFEDVPFHSSYAHSQSLDRLMNPLIDQYLYYLNKTQSNSGTLQQSRLLFSQAGPTSMSLQAKNWLPGPCYRQQRLSKQANDNNNSNFPWTAATKYHLNGRDSLVNPGPAMASHKDDEEKFFPMHGTLIFGKQGTNANDADLDNVMITDEEEIRTTNPVATEQYGTVSNNLQNSNTGPTTGTVNHQGALPGMVWQDRDVYLQGPIWAKIPHTDGHFHPSPLMGGFGLKHPPPQIMIKNTPVPANPPTNFSSAKFASFITQYSTGQVSVEIEWELQKENSKRWNPEIQYTSNYNKSVNVDFTVDTNGVYSEPRPIGTRYLTRNL

SEQ ID NO: 1816 - protein, 735 aa, Artificial Sequence
  Synthetic Polypeptide
MAADGYLPDWLEDTLSEGIRQWWKLKPGPPPPKPAERHKDDSRGLVLPGYKYLGPFNGLDKGEPVNEADAAALEHDKAYDRQLDSGDNPYLKYNHADAEFQERLKEDTSFGGNLGRAVFQAKKRVLEPLGLVEEPVKTAPGKKRPVEHSPVEPDSSSGTGKAGQQPARKRLNFGQTGDADSVPDPQPLGQPPAAPTSLGSTTMATGSGAPMADNNEGADGVGNSSGNWHCDSQWLGDRVITTSTRTWALPTYNNHLYKQISSQSGASNDNHYFGHSTPWGYFDFNRFHCHFSPRDWQRLINNNWGFRPKRLNFKLFNIQVKEVTQNDGTTTIANNLTSTVQVFTDSEYQLPYVLGSAHQGCLPPFPADVFMVSQYGYLTLNNGSQAVGRSSFYCLEYFPSQMLRTGNNFTFSYTFEDVPFHSSYAHSQSLDRLMNPLIDQYLYYLNKTQSNSGTLQQSRLLFSQAGPTSMSLQAKNWLPGPCYRQQRLSKQANDNNNSNFPWTAATKYHLNGRDSLVNPGPAMASHKDDEEKFFPMHGTLIFGKQGTNANDADLDNVMITDEEEIRTTNPVATEQYGTVSNNLQNSNTGPTTGTVNHQGALPGMVWQDRDVYLQGPIWAKIPHTDGHFHPSPLMGGFGLKHPPPQIMIKNTPVPANPPTNFSSAKFASFITQYSTGQVSVEIEWELQKENSKRWNPEIQYTSNYNKSVNVDFTVDTNGVYSEPRPIGTRYLTRNL

SEQ ID NO: 1817 - protein, 735 aa, Artificial Sequence
  Synthetic Polypeptide
MAADGYLPDWLEDTLSEGIRQWWKLKPGPPPPKPAERHKDDSRGLVLPGYKYLGPFNGLDKGEPVNEADAAALEHDKAYDRQLDSGDNPYLKYNHADAEFQERLKEDTSFGGNLGRAVFQAKKRVLEPLGLVEEPVKTAPGKKRPVEHSPVEPDSSSGTGKAGQQPARKRLNFGQTGDADSVPDPQPLGQPPAAPTSLGSTTMATGSGAPMADNNEGADGVGNSSGNWHCDSQWLGDRVITTSTRTWALPTYNNHLYKQISSQSGASNDNHYFGHSTPWGYFDFNRFHCHFSPRDWQRLINNNWGFRPKRLNFKLFNIQVKEVTQNDGTTTIANNLTSTVQVFTDSEYQLPYVLGSAHQGCLPPFPADVFMVSQYGYLTLNNGSQAVGRSSFYCLEYFPSQMLRTGNNFTFSYTFEDVPFHSSYAHSQSLDRLMNPLIDQYLYYLNKTQSNSGTLQQSRLLFSQAGPTSMSLQAKNWLPGPCYRQQRLSKQANDNNNSNFPWTAATKYHLNGRDSLVNPGPAMASHKDDEEKLFPMHGTLIFGKQGTNANDADLDNVMITDEEEIRTTNPVATEQYGTVSNNLQNSNTGPTTGTVNHQGALPGMVWQDRDVYLQGPIWAKIPHTDGHFHPSPLMGGFGLKHPPPQIMIKNTPVPANPPTNFSSAKFASFITQYSTGQVSVEIEWELQKENSKRWNPEIQYTSNYNKSVNVDFTVDTNGVYSEPRPIGTRYLTRNL

SEQ ID NO: 1818 - protein, 735 aa, Artificial Sequence
  Synthetic Polypeptide
MAADGYLPDWLEDTLSEGIRQWWKLKPGPPPPKPAERHKDDSRGLVLPGYKYLGPFNGLDKGEPVNEADAAALEHDKAYDRQLDSGDNPYLKYNHADAEFQERLKEDTSFGGNLGRAVFQAKKRVLEPLGLVEEPVKTAPGKKRPVEHSPVEPDSSSGTGKAGQQPARKRLNFGQTGDADSVPDPQPLGQPPAAPTSLGSTTMATGSGAPMADNNEGADGVGNSSGNWHCDSQWLGDRVITTSTRTWALPTYNNHLYKQISSQSGASNDNHYFGHSTPWGYFDFNRFHCHFSPRDWQRLINNNWGFRPKRLNFKLFNIQVKEVTQNDGTTTIANNLTSTVQVFTDSEYQLPYVLGSAHQGCLPPFPADVFMVPQYGYLTLNNGSQAVGRSSFYCLEYFPSQMLRTGNNFTFSYTFEDVPFHSSYAHSQSLDRLMNPLIDQYLYYLNKTQSNSGTLQQSRLLFSQAGPTSMSLQAKNWLPGPCYRQQRLSKQANDNNNSNFSWTAATKYHLNGRDSLVNPGPAMASHKDDEEKFFPMHGTLIFGKQGTNANDADLDNVMITDEEEIRTTNPVATEQYGTVSNNLQNSNTGPTTGTVNHQGALPGMVWQDRDVYLQGPIWAKIPHTDGHFHPSPLMGGFGLKHPPPQIMIKNTPVPANPPTNFSSAKFASFITQYSTGQVSVEIEWELQKENSKRWNPEIQYTSNYNKSVNVDFTVDTNGVYSEPRPIGTRYLTRNL

SEQ ID NO: 1819 - protein, 735 aa, Artificial Sequence
  Synthetic Polypeptide
MAADGYLPDWLEDTLSEGIRQWWKLKPGPPPPKPAERHKDDSRGLVLPGYKYLGPFNGLDKGEPVNEADAAALEHDKAYDRQLDSGDNPYLKYNHADAEFQERLKEDTSFGGNLGRAVFQAKKRVLEPLGLVEEPVKTAPGKKRPVEHSPVEPDSSSGTGKAGQQPARKRLNFGQTGDADSVPDPQPLGQPPAAPTSLGSTTMATGSGAPMADNNEGADGVGNSSGNWHCDSQWLGDRVITTSTRTWALPTYNNHLYKQISSQSGASNDNHYFGHSTPWGYFDFNRFHCHFSPRDWQRLINNNWGFRPKRLNFKLFNIQVKEVTQNDGTTTIANNLTSTVQVFTDSEYQLPYVLGSAHQGCLPPFPADVFMVPQYGYLTLNNGSQAVGRSSFYCLEYFPSQMLRTGNNFTFSYTFEDVPFHSSYAHSQSLDRLMNPLIDQYLYYLNKTQSNSGTLQQSRLLFSQAGPTSMSLQAKNWLPGPCYRQQRLSKQANDNNNSNFPWTAATKYHLNGRDSLVNPGPAMASHKDDEEKFFPMHGTLIFGKQGTNANDADLDNVMITDEEEIRTTNPLATEQYGTVSNNLQNSNTGPTTGTVNHQGALPGMVWQDRDVYLQGPIWAKIPHTDGHFHPSPLMGGFGLKHPPPQIMIKNTPVPANPPTNFSSAKFASFITQYSTGQVSVEIEWELQKENSKRWNPEIQYTSNYNKSVNVDFTVDTNGVYSEPRPIGTRYLTRNL

SEQ ID NO: 1820 - protein, 735 aa, Artificial Sequence
  Synthetic Polypeptide
MAADGYLPDWLEDTLSEGIRQWWKLKPGPPPPKPAERHKDDSRGLVLPGYKYLGPFNGLDKGEPVNEADAAALEHDKAYDRQLDSGDNPYLKYNHADAEFQERLKEDTSFGGNLGRAVFQAKKRVLEPLGLVEEPVKTAPRKKRPVEHSPVEPDSSSGTGKAGQQPARKRLNFGQTGDADSVPDPQPLGQPPAAPTSLGSTTMATGSGAPMADNNEGADGVGNSSGNWHCDSQWLGDRVITTSTRTWALPTYNNHLYKQISSQSGASNDNHYFGHSTPWGYFDFNRFHCHFSPRDWQRLINNNWGFRPKRLNFKLFNIQVKEVTQNDGTTTIANNLTSTVQVFTDSEYQLPYVLGSAHQGCLPPFPADVFMVPQYGYLTLNNGSQAVGRSSFYCLEYFPSQMLRTGNNFTFSYTFEDVPFHSSYAHSQSLDRLMNPLIDQYLYYLNKTQSNSGTLQQSRLLFSQAGPTSMSLQAKNWLPGPCYRQQRLSKQANDNNNSNFPWTAATKYHLNGRDSLVNPGPAMASHKDDEEKFFPMHGTLIFGKQGTNANDADLDNVMITDEEEIRTTNPVATEQYGTVSNNLQNSNTGPTTGTVNHQGALPGMVWQDRDVYLQGPIWAKIPHTDGHFHPSPLMGGFGLKHPPPQIMIKNTPVPANPPTNFSSAKFASFITQYSTGQVSVEIEWELQKENSKRWNPEIQYTSNYNKSVNVDFTVDTNGVYSEPRPIGTRYLTRNL

SEQ ID NO: 1821 - protein, 735 aa, Artificial Sequence
  Synthetic Polypeptide
MAADGYLPDWLEDTLSEGIRQWWKLKPGPPPPKPAERHKDDSRGLVLPGYKYLGPFNGLDKGEPVNEADAAALEHDKAYDRQLDSGDNPYLKYNHADAEFQERLKEDTSFGGNLGRAVFQAKKRVLEPLGLVEEPVKTAPGKKRPVEHSPVEPDSSSGTGKAGQQPARKRLNFGQTGDADSVPDPQPLGQPPAAPTSLGSTTMATGSGAPMADNNEGADGVGNSSGNWHCDSQWLGDRVITTSTRTWALPTYNNHLYKQISSQSGASNDNHYFGHSTPWGYFDFNRFHCHFSPRDWQRLINNNWGFRPKRLNFKLFNIQVKEVTQNDGTTTIANNLTSTVQVFTDSEYQLPYVLGSAHQGCLPPFPADVFMVPQYGYLTLNNGSQAVGRSSFYCLEYFPSQMLRTGNNFTFSYTFEDVPFHSSYAHSQSLDRLMNPLIDQYLYYLNKTQSNSGTLQQSRLLFSQAGPTSMSLQAKNWLPGPCYRQQRLSKQANDNNNSNFPWTAATKYHLNGRDSLVNPGPAMASHKDDEEKFFPMHGTLIFGKQGTNANDADLDNVMITDEEEIRTTNPVATEQYGTVSNNLQNSNTGPTTGTVNHQGALPGMVWQDRDVYLQGPIWAKIPHTDGRFHPSPLMGGFGLKHPPPQIMIKNTPVPANPPTNFSSAKFASFITQYSTGQVSVEIEWELQKENSKRWNPEIQYTSNYNKSVNVDFTVDTNGVYSEPRPIGTRYLTRNL

SEQ ID NO: 1822 - protein, 735 aa, Artificial Sequence
  Synthetic Polypeptide
MAADGYLPDWLEDTLSEGIRQWWKLKPGPPPPKPAERHKDDSRGLVLPGYKYLGPFNGLDKGEPVNEADAAALEHDKAYDRQLDSGDNPYLKYNHADAEFQERLKEDTSFGGNLGRAVFQAKKRVLEPLGLVEEPVKTAPGKKRPVEHSPVEPDSSSGTGKAGQQPARKRLNFGQTGDADSVPDPQPLGQPPAAPTSLGSTTMATGSGAPMADNNEGADGVGNSSGNWHCDSQWLGDRVITTSTRTWALPTYSNHLYKQISSQSGASNDNHYFGHSTPWGYFDFNRFHCHFSPRDWQRLINNNWGFRPKRLNFKLFNIQVKEVTQNDGTTTIANNLTSTVQVFTDSEYQLPYVLGSAHQGCLPPLPADVFMVPQYGYLTLNNGSQAVGRSSFYCLEYFPSQMLRTGNNFTFSYTFEDVPFHSSYAHSQSLDRLMNPLIDQYLYYLNKTQSNSGTLQQSRLLFSQAGPTSMSLQAKNWLPGPCYRQQRLSKQANDNNNSNFPWTAATKYHLNGRDSLVNPGPAMASHKDDEEKFFPMHGTLIFGKQGTNANDADLDNVMITDEEEIRTTNPVATEQYGTVSNNLQNSNTGPTTGTVNHQGALPGMVWQDRDVYLQGPIWAKIPHTDGHFHPSPLMGGFGLKHPPPQIMIKNTPVPANPPTNFSSAKFASFITQYSTGQVSVEIEWELQKENSKRWNPEIQYTSNYNKSVNVDFTVDTNGVYSEPRPIGTRYLTRNL

SEQ ID NO: 1823 - protein, 735 aa, Artificial Sequence
  Synthetic Polypeptide
MAADGYLPDWLEDTLSEGIRQWWKLKPGPPPPKPAERHKDDSRGLVLPGYKYLGPFNGLDKGEPVNEADAAALEHDKAYDRQLDSGDNPYLKYNHADAEFQERLKEDTSFGGNLGRAVFQAKKRVLEPLGLVEEPVKTAPGKKRPVEHSPVEPDSSSGTGKAGQQPARKRLNFGQTGGADSVPDPQPLGQPPAAPTSLGSTTMATGSGAPMADNNEGADGVGNSSGNWHCDSQWLGDRVITTSTRTWALPTYNNHLYKQISSQSGASNDNHYFGHSTPWGYFDFNRFHCHFSPRDWQRLINNNWGFRPKRLNFKLFNIQVKEVTQNDGTTTIANNLTSTVQVFTDSEYQLPYVLGSAHQGCLPPFPADVFMVPQYGYLTLNNGSQAVGRSSFYCLEYFPSQMLRTGNNFTFSYTFEDVPFHSSYAHSQSLDRLMNPLIDQYLYYLNKTQSNSGTLQQSRLLFSQAGPTSMSLQAKNWLPGPCYRQQRLSKQANDNNNSNFPWTAATKYHLNGRDSLVNPGPAMASHKDDEEKFFPMHGTLIFGKQGTNANDADLDNVMITDEEEIRTTNPVATEQYGTVSNNLQNSNTGPTTGTVNHQGALPGMVWQDRDVYLQGPIWAKIPHTDGHFHPSPLMGGFGLKHPPPQIMIKNTPVPANPPTNFSSAKFASFITQYSTGQVSVEIEWELQKENSKRWNPEIQYTSNYNKSVNVDFTVDTNGVYSEPRPIGTRYLTRNL

SEQ ID NO: 1824 - protein, 735 aa, Artificial Sequence
  Synthetic Polypeptide
MAADGYLPDWLEDTLSEGIRQWWKLKPGPPPPKPAERHKDDSRGLVLPGYKYLGPFNGLDKGEPVNEADAAALEHGKAYDRQLDSGDNPYLKYNHADAEFQERLKEDTSFGGNLGRAVFQAKKRVLEPLGLVEEPVKTAPGKKRPVEHSPVEPDSSSGTGKAGQQPARKRLNFGQTGDADSVPDPQPLGQPPAAPTSLGSTTMATGSGAPMADNNEGADGVGNSSGNWHCDSQWLGDRVITTSTRTWALPTYNNHLYKQISSQSGASNDNHYFGHSTPWGYFDFNRFHCHFSPRDWQRLINNNWGFRPKRLNFKLFNIQVKEVTQNDGTTTIANNLTSTVQVFTDSEYQLPYVLGSAHQGCLPPFPADVFMVPQYGYLTLNNGSQAVGRSSFYCLEYFPSQMLRTGNNFTFSYTFEDVPFHSSYAHSQSLDRLMNPLIDQYLYYLNKTQSNSGTLQQSRLLFSQAGPTSMSLQAKNWLPGPCYRQQRLSKQANDNNNSNFPWTAATKYHLNGRDSLVNPGPAMASHKDDEEKFFPMHGTLIFGKQGTNANDADLDNVMITDEEEIRTTNPVATEQYGTVSNNLQNSNTGPTTGTVNHQGALPGMVWQDRDVYLQGPIWAKIPHTDGHFHPSPLMGGFGLKHPPPQIMIKNTPVPANPPTNFSSAKFASFITQYSTGQVSVEIEWELQKENSKRWNPEIQYTSNYNKSVNVDFTVDTNGVYSEPRPIGTRYLTRNL

SEQ ID NO: 1825 - protein, 735 aa, Artificial Sequence
  Synthetic Polypeptide
MAADGYLPDWLEDTLSEGIRQWWKLKPGPPPPKPAERHKDDSRGLVLPGYKYLGPFNGLDKGEPVNEADAAALEHDKAYDRQLDSGDNPYLKYNHADAEFQERLKEDTSFGGNLGRAVFQAKKRVLEPLGLVEEPVKTAPGKKRPVEHSPVEPDSSSGTGKAGQQPARKRLNFGQTGDADSVPDPQPLGQPPAAPTSLGSTTMATGSGAPMADNNEGADGVGNSSGNWHCDSQWLGDRVITTSTRTWALPTYNNHLYKQISSQSGASNDNHYFGHSTPWGYFDFNRFHCHFSPRDRQRLINNNWGFRPKRLNFKLFNIQVKEVTQNDGTTTIANNLTSTVQVFTDSEYQLPYVLGSAHQGCLPPFPADVFMVPQYGYLTLNNGSQAVGRSSFYCLEYFPSQMLRTGNNFTFSYTFEDVPFHSSYAHSQSLDRLMNPLIDQYLYYLNKTQSNSGTLQQSRLLFSQAGPTSMSLQAKNWLPGPCYRQQRLSKQANDNNNSNFPWTAATKYHLNGRDSLVNPGPAMASHKDDEEKFFPMHGTLIFGKQGTNANDADLDNVMITDEEEIRTTNPVATEQYGTVSNNLQNSNTGPTTGTVNHQGALPGMVWQDRDVYLQGPIWAKIPHTDGHFHPSPLMGGFGLKHPPPQIMIKNTPVPANPPTNFSSAKFASFITQYSTGQVSVEIEWELQKENSKRWNPEIQYTSNYNKSVNVDFTVDTNGVYSEPRPIGTRYLTRNL

SEQ ID NO: 1826 - protein, 735 aa, Artificial Sequence
  Synthetic Polypeptide
MAADGYLPDWLEDTLSEGIRQWWKLKPGPPPPKPAERHKDDSRGLVLPGYKYLGPFNGLDKGEPVNEADAAALEHDKAYDRQLDSGDNPYLKYNHADAEFQERLKEDTSFGGNLGRAVFQAKKRVLEPLGLVEEPVKTAPGKKRPVEHSPVEPDSSSGTGKAGQQPARKRLNFGQTGDADSVPDPQPLGQPPAAPTSLGSTTMATGSGAPMADNNEGADGVGNSSGNWHCDSQWLGDRVITTSTRTWALPTYNNHLYKQISSQSGASNDNHYFGHSTPWGYFDFNRFHCHFSPRDWQRLINNNWGFRPKRPNFKLFNIQVKEVTQNDGTTTIANNLTSTVQVFTDSEYQLPYVLGSAHQGCLPPFPADVFMVPQYGYLTLNNGSQAVGRSSFYCLEYFPSQMLRTGNNFTFSYTFEDVPFHSSYAHSQSLDRLMNPLIDQYLYYLNKTQSNSGTLQQSRLLFSQAGPTSMSLQAKNWLPGPCYRQQRLSKQANDNNNSNFPWTAATKYHLNGRDSLVNPGPAMASHKDDEEKFFPMHGTLIFGKQGTNANDADLDNVMITDEEEIRTTNPVATEQYGTVSNNLQNSNTGPTTGTVNHQGALPGMVWQDRDVYLQGPIWAKIPHTDGHFHPSPLMGGFGLKHPPPQIMIKNTPVPANPPTNFSSAKFASFITQYSTGQVSVEIEWELQKENSKRWNPEIQYTSNYNKSVNVDFTVDTNGVYSEPRPIGTRYLTRNL

SEQ ID NO: 1827 - protein, 735 aa, Artificial Sequence
  Synthetic Polypeptide
MAADGYLPDWLEDTLSEGIRQWWKLKPGPPPPKPAERHKDDSRGLVLPGYKYLGPFNGLDKGEPVNEADAAALEHDKAYDRQLDSGDNPYLKYNHADAEFQERLKEDTSFGGNLGRAVFQAKKRVLEPLGLVEEPVKTAPGKKRPVEHSPVEPDSSSGTGKAGQQPARKRLNFGQTGDADSVPDPQPLGQPPAAPTSLGSTTMATGSGAPMADNNEGADGVGNSSGNWHCDSQWLGDRVITTSTRTWALPTYNNHLYKQISSQSGASNDNHYFGHSTPWGYFDFNRFHCHFSPRDWQRLINNNWGFRPKRLNFKLFNIQVKEVTQNDGTTTIANNLTSTVQVFTDSEYQLPYVLGSAHQGCLPPFPADVFMVPQYGYLTLNNGSQAVGRSSFYCLEYFPSQMLRTGNNFTFSYTFEDVPFHSSYAHSQSLDRLMNPLIDQYLYYLNKTQSNSGTLQQSRLLFSQAGPTSMSLQAKNWLPGPCYRQQRLSKQANDNNNSNFPWTAATKYHLNGRDSLVNPGPAMASHKDDEEKFFPMHGTLIFGKQGTNANDADLDNVMITDEEEIRTTNPVATEQYGTVSNNLQNSNTGPTTGTVNHQGALPGMVWQDRDVYLQGPIWAKIPHTDGHFHPSPLMGGFGLKHPPPQIMIKNTPVPANPPTNFSSAKFASFITQYSTGQVSVEIEWELQKENSKRWNPEIQYTSNYNKSVNVDFTVGTNGVYSEPRPIGTRYLTRNL

SEQ ID NO: 1828 - protein, 735 aa, Artificial Sequence
  Synthetic Polypeptide
MAADGYLPDWLEDTLSEGIRQWWKLKPGPPPPKPAERHKDDSRGLVLPGYKYLGPFNGLDKGEPVNEADAAALEHDKAYDRQLDSGDNPYLKYNHADAEFQERLKEDTSFGGNLGRAVFQAKKRVLEPLGLVEEPVKTAPGKKRPVEHSPVEPDSSSGTGKAGQQPARKRLNFGQTGDADSVPDPQPLGQPPAAPTSLGSTTMATGSGAPMADNNEGADGVGNSSGNWHCDSQWLGDRVITTSTRTWALPTYNNHLYKQISSQSGASNDNHYFGHSTPWGYFDFNRFHCHFSPRDWQRLINNNWGFRPKRLNFKLFNIQVKEVTQNDGTTTIANNLTSTVQVFTDSEYQLPYVLGSAHQGCLPPFPADVFMVPQYGYLTLNNGSQAVGRSSFYCLEYFPSQMLRTGNNFTFSYTFEDVPFHSSYAHSQSLDRLMNPLIDQYLYYLNKTQSNSGTLQQSRLLFSQAGPTSTSLQAKNWLPGPCYRQQRLSKQANDNNNSNFPWTAATKYHLNGRDSLVNPGPAMASHKDDEEKFFPMHGTLIFGKQGTNANDADLDNVMITDEEEIRTTNPVATEQYGTVSNNLQNSNTGPTTGTVNHQGALPGMVWQDRDVYLQGPIWAKIPHTDGHFHPSPLMGGFGLKHPPPQIMIKNTPVPANPPTNFSSAKFASFITQYSTGQVSVEIEWELQKENSKRWNPEIQYTSNYNKSVNVDFTVDTNGVYSEPRPIGTRYLTRNL

SEQ ID NO: 1829 - protein, 735 aa, Artificial Sequence
  Synthetic Polypeptide
MAADGYLPDWLEDTLSEGIRQWWKLKPGPPPPKPAERHKDDSRGLVLPGYKYLGPFNGLDKGEPVNEADAAALEHDKAYDRQLDSGDNPYLKYNHADAEFQERLKEDTSFGGNLGRAVFQAKKRVLEPLGLVEEPVKTAPGKKRPVEHSPVEPDSSSGTGKAGQQPARKRLNFGQTGDADSVPDPQPLGQPPAAPTSLGSTTMATGSGAPMADNNEGADGVGNSSGNWHCDSQWLGDRVITTSTRTWALPTYNNHLYKQISSQSGASNDNHYFGHSTPWGYFDFNRFHCHFSPRDWQRLINNNWGFRPKRLNFKLFNIQVKEVTQNDGTTTIANNLTSTVQVFTDSEYQLPYVLGSAHQGCLPPFPADVFMVPQYGYLTLNNGSQAVGRSSFYCLEYFPSQMLRTGNNFTFSYTFEDVPFHSSYAHSQSLDRLMNPLIDQYLYYLNKTQSNSGTLQQSRLLFSQAGPTSMSLQAKNWLPGPCYRQQRLSKQANDNNNSNFPWTAATKYHLNGRDSLVNPGPAMASHKDDEEKFFPMHGTLIFGKQGTNANDADLDNVMITDEEEIRTTNPVATEQYGTVSNNLQNSNTGPTTGTINHQGALPGMVWQDRDVYLQGPIWAKIPHTDGHFHPSPLMGGFGLKHPPPQIMIKNTPVPANPPTNFSSAKFASFITQYSTGQVSVEIEWELQKENSKRWNPEIQYTSNYNKSVNVDFTVDTNGVYSEPRPIGTRYLTRNL

SEQ ID NO: 1830 - protein, 735 aa, Artificial Sequence
  Synthetic Polypeptide
MAADGYLPDWLEDTLSEGIRQWWKLKPGPPPPKPAERHKDDSRGLVLPGYKYLGPFNGLDKGEPVNEADAAALEHDKAYDRQLDSGDNPYLKYNHADAEFQERLKEDTSFGGNLGRAVFQAKKRVLEPLGLVEEPVKTAPGKKRPVEHSPVEPDSSSGTGKAGQQPARKRLNFGQTGDADSVPDPQPLGQPPAAPTSLGSTTMATGSGAPMADNNEGADGVGNSSGNWHCDSQWLGDRVITTSTRTWALPTYNNHLYKQISSQSGASNDNHYFGHSTPWGYFDFNRFHCHFSPRDWQRLINNNWGFRPKRLNFKLFNIQVKEVTQNDGTATIANNLTSTVQVFTDSEYQLPYVLGSAHQGCLPPFPADVFMVPQYGYLTLNNGSQAVGRSSFYCLEYFPSQMLRTGNNFTFSYTFEDVPFHSSYAHSQSLDRLMNPLIDQYLYYLNKTQSNSGTLQQSRLLFSQAGPTSMSLQAKNWLPGPCYRQQRLSKQANDNNNSNFPWTAATKYHLNGRDSLVNPGPAMASHKDDEEKFFPMHGTLIFGKQGTNANDADLDNVMITDEEEIRTTNPVATEQYGTVSNNLQNSNTGPTTGTVNHQGALPGMVWQDRDVYLQGPIWAKIPHTDGHFHPSPLMGGFGLKHPPPQIMIKNTPVPANPPTNFSSAKFASFITQYSTGQVSVEIEWELQKENSKRWNPEIQYTSNYNKSVNVDFTVDTNGVYSEPRPIGTRYLTRNL

SEQ ID NO: 1831 - protein, 735 aa, Artificial Sequence
  Synthetic Polypeptide
MAADGYLPDWLEDTLSEGIRQWWKLKPGPPPPKPAERHKDDSRGLVLPGYKYLGPFNGLDKGEPVNEADAAALEHDKAYDRQLDSGDNPYLKYNHADAEFQERLKEDTSFGGNLGRAVFQAKKRVLEPLGLVEEPVKTAPGKKRPVEHSPVEPDSSSGTGKAGQQPARKRLNFGQTGDADSVPDPQPLGQPPAAPTSLGSTTMATGSGAPMADNNEGADGVGNSSGNWHCDSQWLGDRVITTSTRTWALPTYNNHLYKQISSQSGASNDNHYFGHSTPWGYFDFNRFHCHFSPRDWQRLINNNWGFRPKRLNFKLFNIQVKEVTQNDGTTTIANNLTSTVQVFTDSEYQLPYVLGSAHQGCLPPFPADVFMVPQYGYLTLNNGSQAVGRSSFYCLEYFPSQMLRTGNNFTFSYTFEDVPFHSSYAHSQSLDRLMNPLIDQYLYYLNKTQSNSGTLQQSRLLFSQAGPTSMSLQAKNWLPGPCYRQQRLSKQANDNNNSNFPWTVATKYHLNGRDSLVNPGPAMASHKDDEEKFFPMHGTLIFGKQGTNANDADLDNVMITDEEEIRTTNPVATEQYGTVSNNLQNSNTGPTTGTVNHQGALPGMVWQDRDVYLQGPIWAKIPHTDGHFHPSPLMGGFGLKHPPPQIMIKNTPVPANPPTNFSSAKFASFITQYSTGQVSVEIEWELQKENSKRWNPEIQYTSNYNKSVNVDFTVDTNGVYSEPRPIGTRYLTRNL

SEQ ID NO: 1832 - protein, 735 aa, Artificial Sequence
  Synthetic Polypeptide
MAADGYLPDWLEDTLSEGIRQWWKLKPGPPPPKPAERHKDDSRGLVLPGYKYLGPFNGLDKGEPVNEADAAALEHDKAYDRQLDSGDNPYLKYNHADAEFQERLKEDTSFGGNLGRAVFQAKKRVLEPLGLVEEPVKTAPGKKRPVEHSPVEPDSSSGTGKAGQQPARKRLNFGQTGDADSVPDPQPLGQPPAAPTSLGSTTMATGSGAPMADNNEGADGVGNSSGNWHCDSQWLGDRVITTSTRTWALPTYNNHLYKQISSQSGASNDNHYFGHSTPWGYFDFNRFHCHFSPRDWQRLINNNWGFRPKRLNFKLFNIQVKEVTQNDGTTTIANNLTSTVQVFTDSEYQLPYVLGSAHQGCLPPFPADVFMVPQYGYLTLNNGSQAVGRSSFYCLEYFPSQMLRTGNNFTFSYTFEDVPFHSSYAHSQSLDRLMNPLIDQYLYYLNKTQSNSGTLQQSRLLFSQAGPTSMSLQAKNWLPGPCYRQQRLSKQANDNNNSNFPWTAATKYHLNGRDSLVNPGPAMASHKDDEEKFFPMHGTLIFGKQGTNANDADLDNVMITDEEEIRTTNPVATEQYGTVSNNLQNSNTGPTTGTVNHQGALPGMVWQDRDVYLQGPIWAKIPHTDGHFHPSPLMGGFGLKHPPPQIMIKNTPVPANPPTNFSSAKFASFITQHSTGQVSVEIEWELQKENSKRWNPEIQYTSNYNKSVNVDFTVDTNGVYSEPRPIGTRYLTRNL

SEQ ID NO: 1833 - protein, 735 aa, Artificial Sequence
  Synthetic Polypeptide
MAADGYLPDWLEDTLSEGIRQWWKLKPGPPPPKPAERHKDDGRGLVLPGYKYLGPFNGLDKGEPVNEADAAALEHDKAYDRQLDSGDNPYLKYNHADAEFQERLKEDTSFGGNLGRAVFQAKKRVLEPLGLVEEPVKTAPGKKRPVEHSPVEPDSSSGTGKAGQQPARKRLNFGQTGDADSVPDPQPLGQPPAAPTSLGSTTMATGSGAPMADNNEGADGVGNSSGNWHCDSQWLGDRVITTSTRTWALPTYNNHLYKQISSQSGASNDNHYFGYSTPWGYFDFNRFHCHFSPRDWQRLINNNWGFRPKRLNFKLFNIQVKEVTQNDGTTTIANNLTSTVQVFTDSEYQLPYVLGSAHQGCLPPFPADVFMVPQYGYLTLNNGSQAVGRSSFYCLEYFPSQMLRTGNNFTFSYTFEDVPFHSSYAHSQSLDRLMNPLIDQYLYYLNKTQSNSGTLQQSRLLFSQAGPTSMSLQAKNWLPGPCYRQQRLSKQANDNNNSNFPWTAATKYHLNGRDSLVNPGPAMASHKDDEEKFFPMHGTLIFGKQGTNANDADLDNVMITDEEEIRTTNPVATEQYGTVSNNLQNSNTGPTTGTVNHQGALPGMVWQDRDVYLQGPIWAKIPHTDGHFHPSPLMGGFGLKHPPPQIMIKNTPVPANPPTNFSSAKFASFITQYSTGQVSVEIEWELQKENSKRWNPEIQYTSNYNKSVNVDFTVDTNGVYSEPRPIGTRYLTRNL

SEQ ID NO: 1834 - protein, 735 aa, Artificial Sequence
  Synthetic Polypeptide
MAADGYLPDWLEDTLSEGIRQWWKLKPGPPPPKPAERHKDDSRGLVLPGYKYLGPFNGLDKGEPVNEADAAALEHDKAYDRQLDSGDNPYLKYNHADAELQERLKEDTSFGGNLGRAVFQAKKRVLEPLGLVEEPVKTAPGKKRPVEHSPVEPDSSSGTGKAGQQPARKRLNFGQTGDADSVPDPQPLGQPPAAPTSLGSTTMATGSGAPMADNNEGADGVGNSSGNWHCDSQWLGDRVITTSTRTWALPTYNNHLYKQISSQSGASNDNHYFGYSTPWGYFDFNRFHCHFSPRDWQRLINNNWGFRPKRLNFKLFNIQVKEVTQNDGTTTIANNLTSTVQVFTDSEYQLPYVLGSAHQGCLPPFPADVFMVPQYGYLTLNNGSQAVGRSSFYCLEYFPSQMLRTGNNFTFSYTFEDVPFHSSYAHSQSLDRLMNPLIDQYLYYLNKTQSNSGTLQQSRLLFSQAGPTSMSLQAKNWLPGPCYRQQRLSKQANDNNNSNFPWTAATKYHLNGRDSLVNPGPAMASHKDDEEKFFPMHGTLIFGKQGTNANDADLDNVMITDEEEIRTTNPVATEQYGTVSNNLQNSNTGPTTGTVNHQGALPGMVWQDRDVYLQGPIWAKIPHTDGHFHPSPLMGGFGLKHPPPQIMIKNTPVPANPPTNFSSAKFASFITQYSTGQVSVEIEWELQKENSKRWNPEIQYTSNYNKSVNVDFTVDTNGVYSEPRPIGTRYLTRNL

SEQ ID NO: 1835 - protein, 735 aa, Artificial Sequence
  Synthetic Polypeptide
MAADGYLPDWLEDTLSEGIRQWWKLKPGPPPPKPAERHKDDSRGLVLPGYKYLGPFNGLDKGEPVNEADAAALEHDKAYDRQLDSGDNPYLKYNHADAEFQERLKEDTSFGGNLGRAVFQAKKRVLEPLGLVEEPVKTAPGKKRPVEHSPVEPDSSSGTGKAGQQPARKRLNFGQTGDADSVPDPQPLGQPPAAPTSLGSTTMATGSGAPMADNNEGADGVGNSSGNWHCDSQWLGDRVITTSTRTWALPTYNNHLYKQISSQSGASNDNHYFGYSTPWGYFDFNRFHCHFSPRDWQRLINNNWGFRPKRLNFKLFNIQVKEVTQNDGTTTIANNLTSTVQVFTDSEYQLPYVLGSAHQGCLPPFPADVFMVPQYGYLTLNNGSQAVGRSSFYCLEYFPSQMLRTGNNFTFSYTFEDVPFHSSYAHSQSLDRLMNPLIDQYLYYLNKTQSNSGTLQQSRLLFSQAGPTSMSLQAKNWLPGPCYRQQRLSKQANDNNNSNFPWTAATKYHLNGRDSLVNPGPAMASHKDDEEKFFPMHGTLIFGKQGTNANDADLDNVMITDEEEIRTTNPVATEQYGTVSNNLQNSNTGPTTGTVNHQGALPGMVWQDRDVYLQGPIWAKIPHTDGHFHPSPLVGGFGLKHPPPQIMIKNTPVPANPPTNFSSAKFASFITQYSTGQVSVEIEWELQKENSKRWNPEIQYTSNYNKSVNVDFTVDTNGVYSEPRPIGTRYLTRNL

SEQ ID NO: 1836 - protein, 735 aa, Artificial Sequence
  Synthetic Polypeptide
MAADGYLPDWLEDTLSEGIRQWWKLKPGPPPPKPAERHKDDSRGLVLPGYKYLGPFNGLDKGEPVNEADAAALEHDKAYDRQLDSGDNPYLKYNHADAEFQERLKEDTSFGGNLGRAVFQAKKRVLEPLGLVEEPVKTAPGKKRPVEHSPVEPDSSSGTGKAGQQPARKRLNFGQTGDADSVPDPQPLGQPPAAPTSLGSTTMATGSGAPMADNNEGADGVGNSSGNWHCDSQWLGDRVITTSTRTWALPTYNNHLYKQISSQSGASNDNHYFGYSTPWGYFDFNRFHCHFSPRDWQRLINNNWGFRPKRLNFKLFNIQVKEVTQNDGTTTIANNLTSTVQVFTDSEYQLPYVLGSAHQGCLPPFPADVFMVPQYGYLTLNNGSQAVGRSSFYCLEYFPSQMLRTGNNFTFSYTFEDVPFHSSYAHSQSLDRLMNPLIDQYLYYLNKTQSNSGTLQQSRLLFSQAGPTSMSLQAKNWLPGPCYRQQRLSKQANDNNNSNFPWTAATKYHLNGRDSLVNPGPAMASHKDDEEKFFPMHGTLIFGKQGTNANDADLDNVMITDEEEIRTTNPVATEQYGTVSNNLQNSNTGPTTGTVNHQGALPGMVWQDRDVYLQGPIWAKIPHTDGHFHPSPLMGGFGLKHPPPQIMIKNTPVPANPPTNFSSAKFASFITQYSTGQVGVEIEWELQKENSKRWNPEIQYTSNYNKSVNVDFTVDTNGVYSEPRPIGTRYLTRNL

SEQ ID NO: 1837 - protein, 735 aa, Artificial Sequence
  Synthetic Polypeptide
MAADGYLPDWLEDTLSEGIRQWWKLKPGPPPPKPAERHKDDSRGLVLPGYKYLGPFNGLDKGEPVNEADAAALEHDKAYDRQLDSGDNPYLKYNHADAEFQERLKEDTSFGGNLGRAVFQAKKRVLEPLGLVEEPVKTAPGKKRPVEHSPVEPDSSSGTGKAGQQPARKRLNFGQTGDADSVPDPQPLGQPPAAPTSLGSTTMATGSGAPMADNNEGADGVGNSSGNWHCDSQWLGDRVITTSTRTWALPTYNNHLYKQISSQSGASNDNHYFGYSTPWGYFDFNRFHCHFSPRDWQRLINNNWGFRPKRLNFKLFNIQVKEVTQNDGTTTIANNLTSTVQVFTDSEYQPPYVLGSAHQGCLPPFPADVFMVPQYGYLTLNNGSQAVGRSSFYCLEYFPSQMLRTGNNFTFSYTFEDVPFHSSYAHSQSLDRLMNPLIDQYLYYLNKTQSNSGTLQQSRLLFSQAGPTSMSLQAKNWLPGPCYRQQRLSKQANDNNNSNFPWTAATKYHLNGRDSLVNPGPAMASHKDDEEKFFPMHGTLIFGKQGTNANDADLDNVMITDEEEIRTTNPVATEQYGTVSNNLQNSNTGPTTGTVNHQGALPGMVWQDRDVYLQGPIWAKIPHTDGHFHPSPLMGGFGLKHPPPQIMIKNTPVPANPPTNFSSAKFASFITQYSTGQVSVEIEWELQKENSKRWNPEIQYTSNYNKSVNVDFTVDTNGVYSEPRPIGTRYLTRNL

SEQ ID NO: 1838 - protein, 735 aa, Artificial Sequence
  Synthetic Polypeptide
MAADGYLPDWLEDTLSEGIRQWWKLKPGPPPPKPAERHKDDSRGLVLPGYKYLGPFNGLDKGEPVNEADAAALEHDKAYDRQLDSGDNPYLKYNHADAEFQERLKEDTSFGGNLGRAVFQAKKRVLEPLGLVEEPVKTAPGKKRPVEHSPVEPDSSSGTGKAGQQPARKRLNFGQTGDADSVPDPQPLGQPPAAPTSLGSTTMATGSGAPMADNDEGADGVGNSSGNWHCDSQWLGDRVITTSTRTWALPTYNNHLYKQISSQSGASNDNHYFGYSTPWGYFDFNRFHCHFSPRDWQRLINNNWGFRPKRLNFKLFNIQVKEVTQNDGTTTIANNLTSTVQVFTDSEYQLPYVLGSAHQGCLPPFPADVFMVPQYGYLTLNNGSQAVGRSSFYCLEYFPSQMLRTGNNFTFSYTFEDVPFHSSYAHSQSLDRLMNPLIDQYLYYLNKTQSNSGTLQQSRLLFSQAGPTSMSLQAKNWLPGPCYRQQRLSKQANDNNNSNFPWTAATKYHLNGRDSLVNPGPAMASHKDDEEKFFPMHGTLIFGKQGTNANDADLDNVMITDEEEIRTTNPVATEQYGTVSNNLQNSNTGPTTGTVNHQGALPGMVWQDRDVYLQGPIWAKIPHTDGHFHPSPLMGGFGLKHPPPQIMIKNTPVPANPPTNFSSAKFASFITQYSTGQVSVEIEWELQKENSKRWNPEIQYTSNYNKSVNVDFTVDTNGVYSEPRPIGTRYLTRNL

SEQ ID NO: 1839 - protein, 735 aa, Artificial Sequence
  Synthetic Polypeptide
MAADGYLPDWLEDTLSEGIRQWWKLKPGPPPPKPAERHKDDSRGLVLPGYKYLGPFNGLDKGEPVNEADAAALEHDKAYDRQLDSGDNPYLKYNHADAEFQERLKEDTSFGGNLGRAVFQAKKRVLEPLGLVEEPVKTAPGKKRPVEHSPVEPDSSSGTGKAGQQPARKRLNFGQTGDADSVPDPQPLGQPPAAPTSLGSTTMATGSGAPMADNNEGADGVGNSSGNWHCDSQWLGDRVITTSTRTWALPTYNNHLYKQISSQSGASNDNHYFGYSTPWGYFDFNRFHCHFSPRDWQRLINNNWGFRPKRLNFKLFNIQVKEVTQNDGTTTIANNLTSTVQVFTDSEYQLPYVLGSAHQGCLPPFPADVFMVPQYGYLTLNNGSQAVGRSSFYCLEYFPSQMLRTGNNFTFSYTFEDVPFHSSYAHSQSLDRLMNPLIDQYLYYLNKTQSNSGTLQQSRLLFSQAGPTSMSLQAKNWLPGPCYRQQRLPKQANDNNNSNFPWTAATKYHLNGRDSLVNPGPAMASHKDDEEKFFPMHGTLIFGKQGTNANDADLDNVMITDEEEIRTTNPVATEQYGTVSNNLQNSNTGPTTGTVNHQGALPGMVWQDRDVYLQGPIWAKIPHTDGHFHPSPLMGGFGLKHPPPQIMIKNTPVPANPPTNFSSAKFASFITQYSTGQVSVEIEWELQKENSKRWNPEIQYTSNYNKSVNVDFTVDTNGVYSEPRPIGTRYLTRNL

SEQ ID NO: 1840 - protein, 735 aa, Artificial Sequence
  Synthetic Polypeptide
MAADGYLPDWLEDTLSEGIRQWWKLKPGPPPPKPAERHKDDSRGLVLPGYKYLGPFNGLDKGEPVNEADAAALEHDKAYDRQLDSGDNPYLKYNHADAEFQERLKEDTSFGGNLGRAVFQAKKRVLEPLGLVEEPVKTAPGKKRPVEHSPVEPDSSSGTGKAGQQPARKRLNFGQTGDADSVPDPQPLGQPPAAPTSLGSTTMATGSGAPMADNNEGADGVGNSSGNWHCDSQWLGDRVITTSTRTWALPTYNNHLYKQISSQSGASNDNHYFGYSTPWGYFDFNRFHCHFSPRDWQRLINNNWGFRPKRLNFKLFNIQVKEVTQNDGTTTIANNLTSTVQVFTDSEYQLPYVLGSAHQGCLPPFPADVFMVPQYGYLTLNNGSQAVGRSSFYCLEYFPSQMLRTGNNFTFSYTFEDVPFHSSYAHSQSLDRLMNPLIDQYLYYLNKTQSNSGTLQQSRLLFSQAGPTSMSLQAKNWLPGPCYRQQRLSKQANDNNNSNFPWTAATKYHLNGRDSLVNPGPAMASHKDDEEKFFPMHGTLIFGKQGTNANDADLDNVMITDEEEIRTTNPVATEQYGTVSNNLQNSNTGPTTGTVNHQGALPGMVWQDRDVYLQGPIWAKIPHTDGHFHPSPLMGGFGLKHPPPQIMIKNTPVPANPPTNLSSAKFASFITQYSTGQVSVEIEWELQKENSKRWNPEIQYTSNYNKSVNVDFTVDTNGVYSEPRPIGTRYLTRNL

SEQ ID NO: 1841 - protein, 735 aa, Artificial Sequence
  Synthetic Polypeptide
MAADGYLPDWLEDTLSEGIRQWWKLKPGPPPPKPAERHKDDSRGLVLPGYKYLGPFNGLDKGEPVNEADAAALEHDKAYDRQLDSGDNPYLKYNHADAEFQERLKEDTSFGGNLGRAVFQAKKRVLEPLGLVEEPVKTAPGKKRPVEHSPVEPDSSSGTGKAGQQPARKRLNFGQTGDADSVPDPQPLGQPPAAPTSLGSTTMATGSGAPMADNNEGADGVGNSSGNWHCDSQWLGDRVITTSTRTWALPTYNNHLYKQISSQSGASNDNHYFGYSTPWGYFDFNRFHCHFSPRDWQRLINNNWGFRPKRLNFKLFNIQVKEVTQNDGTTTIANNLTSTVQVFTDSEYQLPYVLGSAHQGCLPPFPADVFMVPQYGYLTPNNGSQAVGRSSFYCLEYFPSQMLRTGNNFTFSYTFEDVPFHSSYAHSQSLDRLMNPLIDQYLYYLNKTQSNSGTLQQSRLLFSQAGPTSMSLQAKNWLPGPCYRQQRLSKQANDNNNSNFPWTAATKYHLNGRDSLVNPGPAMASHKDDEEKFFPMHGTLIFGKQGTNANDADLDNVMITDEEEIRTTNPVATEQYGTVSNNLQNSNTGPTTGTVNHQGALPGMVWQDRDVYLQGPIWAKIPHTDGHFHPSPLMGGFGLKHPPPQIMIKNTPVPANPPTNFSSAKFASFITQYSTGQVSVEIEWELQKENSKRWNPEIQYTSNYNKSVNVDFTVDTNGVYSEPRPIGTRYLTRNL

SEQ ID NO: 1842 - protein, 735 aa, Artificial Sequence
  Synthetic Polypeptide
MAADGYLPDWLEDTLSEGIRQWWKLKPGPPPPKPAERHKDDSRGLVLPGYKYLGPFNGLDKGEPVNEADAAALEHDKAYDRQLDSGDNPYLKYNHADAEFQERLKEDTSFGGNLGRAVFQAKKRVLEPLGLVEEPVKTAPGKKRPVEHSPVEPDSSSGTGKAGQQPARKRLNFGQTGDADSVPDPQPLGQPPAAPTSLGSTTMATGSGAPMADNNEGADGVGNSSGNWHCDSQWLGDRVITTSTRTWALPTYNNHLYKQISSQSGASNDNHYFGYSTPWGYFDFNRFHCHFSPRDWQRLINNNWGFRPKRLNFKLFNIQVKEVTQNDGTTTIANNLTSTVQVFTDSEYQLPYVLGSAHQGCLPPFPADVFMVPQYGYLTLNNGSQAVGRSSFYCLEYFPSQMLRTGNNFTFSYTFEDVPFHSSYAHSQSLDRLMNPLIDQYLYYLNKTQSNSGTLRQSRLLFSQAGPTSMSLQAKNWLPGPCYRQQRLSKQANDNNNSNFPWTAATKYHLNGRDSLVNPGPAMASHKDDEGKFFPMHGTLIFGKQGTNANDADLDNVMITDEEEIRTTNPVATEQYGTVSNNLQNSNTGPTTGTVNHQGALPGMVWQDRDVYLQGPIWAKIPHTDGHFHPSPLMGGFGLKHPPPQIMIKNTPVPANPPTNFSSAKFASFITQYSTGQVSVEIEWELQKENSKRWNPEIQYTSNYNKSVNVDFTVDTNGVYSEPRPIGTRYLTRNL

SEQ ID NO: 1843 - protein, 735 aa, Artificial Sequence
  Synthetic Polypeptide
MAADGYLPDWLEDTLSEGIRQWWKLKPGPPPPKPAERHKDDSRGLVLPGYKYLGPFNGLDKGEPVNEADAAALEHDKAYDRQLDSGDNPYLKYNHADAEFQERLKEDTSFGGNLGRAVFQAKKRVLEPLGLVEEPVKTAPGKKRPVEHSPVEPDSSSGTGKAGQQPARKRLNFGQTGDADSVPDPQPLGQPPAAPTSLGSTTMATGSGAPMADNNEGADGVGNSSGNWHCDSQWLGDRVITTSTRTWALPTYNNHLYKQISSQSGASNDNHYFGYSTPWGYFDFNRFHCHFSPRDWQRLINNNWGFRPKRLNFKLFNIQVKEVTQNDGTTTIANNLTSTVQVFTDSEYQLPYVLGSAHQGCLPPFPADVFMVPQYGYLTLNNGSQAVGRSSFYCLEYFPSQMLRTGNNFTFSYTFEDVPFHSSYAHSQSLDRLMNPLIDQYLYYLNKTQSNSGTLQQSRLLFSQAGPTSMSLQAKNWLPGPCYRQQRLSKQANDNNNSNFPWTAATKYHLNGRDSLVNPGPAMASHKDDEEKFFPMHGTLIFGKQGTNANDADLDNAMITDEEEIRTTNPVATEQYGTVSNNLQNSNTGPTTGTVNHQGALPGMVWQDRDVYLQGPIWAKIPHTDGHFHPSPLMGGFGLKHPPPQIMIKNTPVPANPPTNFSSAKFASFITQYSTGQVSVEIEWELQKENSKRWNPEIQYTSNYNKSVNVDFTVDTNGVYSEPRPIGTRYLTRNL

SEQ ID NO: 1844 - protein, 735 aa, Artificial Sequence
  Synthetic Polypeptide
MAADGYLPDWLEDTLSEGIRQWWKLKPGPPPPKPAERHKDDSRGLVLPGYKYLGPFNGLDKGEPVNEADAAALEHDKAYDRQLDSGDNPYLKYNHADAEFQERLKEDTSFGGNLGRAVFQAKKRVLEPLGLVEEPVKTAPGKKRPVEHSPVEPDSSSGTGKAGQQPARKRLNFGQTGDADSVPDPQPLGQPPAAPTSLGSTTMATGSGAPMAGNNEGADGVGNSSGNWHCDSQWLGDRVITTSTRTWALPTYNNHLYKQISSQSGASNDNHYFGYSTPWGYFDFNRFHCHFSPRDWQRLINNNWGFRPKRLNFKLFNIQVKEVTQNDGTTTIANNLTSTVQVFTDSEYQLPYVLGSAHQGCLPPFPADVFMVPQYGYLTLNNGSQAVGRSSFYCLEYFPSQMLRTGNNFTFSYTFEDVPFHSSYAHSQSLDRLMNPLIDQYLYYLNKTQSNSGTLQQSRLLFSQAGPTSMSLQAKNWLPGPCYRQQRLSKQANDNNNSNFPWTAATKYHLNGRDSLVNPGPAMASHKDDEEKFFPMHGTLIFGKQGTNANDADLDNVMITDEEEIRTTNPVATEQYGTVSNNLQNSNTGPTTGTVNHQGALPGMVWQDRDVYLQGPIWAKIPHTDGHFHPSPLMGGFGLKHPPPQIMIKNTPVPANPPTNFSSAKFASFITQYSTGQVSVEIEWELQKENSKRWNPEIQYTSNYNKSVNVDFTVDTNGVYSEPRPIGTRYLTRNL

SEQ ID NO: 1845 - protein, 735 aa, Artificial Sequence
  Synthetic Polypeptide
MAADGYLPDWLEDTLSEGIRQWWKLKPGPPPPKPAERHKDDSRGLVLPGYKYLGPFNGLDKGEPVNEADAAALEHDKAYDRQLDSGDNPYLKYNHADAEFQERLKEDTSFGGNLGRAVFQAKKRVLEPLGLVEEPVKTAPGKKRPVEHSPVEPDSSSGTGKAGQQPARKRLNFGQTGDADSVPDPQPLGQPPAAPTSLGSTTMATGSGAPMADNNEGADGVGNSSGNWHCDSQWLGDRVITTSTRTWALPTYNNHLYKQISSQSGASNDNHYFGYSTPWGYFDFNRFHCHFSPRDWQRLINNNWGFRPKRLNFKLFNIQVKEVAQNDGTTTIANNLTSTVQVFTDSEYQLPYVLGSAHQGCLPPFPADVFMVPQYGYLTLNNGSQAVGRSSFYCLEYFPSQMLRTGNNFTFSYTFEDVPFHSSYAHSQSLDRLMNPLIDQYLYYLNKTQSNSGTLQQSRLLFSQAGPTSMSLQAKNWLPGPCYRQQRLSKQANDNNNSNFPWTAATKYHLNGRDSLVNPGPAMASHKDDEEKFFPMHGTLIFGKQGTNANDADLDNVMITDEEEIRTTNPVATEQYGTVSNNLQNSNTGPTTGTVNHQGALPGMVWQDRDVYLQGPIWAKIPHTDGHFHPSPLMGGFGLKHPPPQIMIKNTPVPANPPTNFSSAKFASFITQYSTGQVSVEIEWELQKENSKRWNPEIQYTSNYNKSVNVDFTVDTNGVYSEPRPIGTRYLTRNL

SEQ ID NO: 1846 - protein, 735 aa, Artificial Sequence
  Synthetic Polypeptide
MAADGYLPDWLEDTLSEGIRQWWKLKPGPPPPKPAERHKDDSRGLVLPGYKHLGPFNGLDKGEPVNEADAAALEHDKAYDRQLDSGDNPYLKYNHADAEFQERLKEDTSFGGNLGRAVFQAKKRVLEPLGLVEEPVKTAPGKKRPVEHSPVEPDSSSGTGKAGQQPARKRLNFGQTGDADSVPDPQPLGQPPAAPTSLGSTTMATGSGAPMADNNEGADGVGNSSGNWHCDSQWLGDRVITTSTRTWALPTYNNHLYKQISSQSGASNDNHYFGYSTPWGYFDFNRFHCHFSPRDWQRLINNNWGFRPKRLNFKLFNIQVKEVTQNDGTTTIANNLTSTVQVFTDSEYQLPYVLGSAHQGCLPPFPADVFMVPQYGYLTLNNGSQAVGRSSFYCLEYFPSQMLRTGNNFTFSYTFEDVPFHSSYAHSQSLDRLMNPLIDQYLYYLNKTQSNSGTLQQSRLLFSQAGPTSMSLQAKNWLPGPCYRQQRLSKQANDNNNSNFPWTAATKYHLNGRDSLVNPGPAMASHKDDEEKFFPMHGTLIFGKQGTNANDADLDNVMITDEEEIRTTNPVATEQYGTVSNNLQNSNTGPTTGTVNHQGALPGMVWQDRDVYLQGPIWAKIPHTDGHFHPSPLMGGFGLKHPPPQIMIKNTPVPANPPTNFSSAKFASFITQYSTGQVSVEIEWELQKENSKRWNPEIQYTSNYNKSVNVDFTVDTNGVYSEPRPIGTRYLTRNL

SEQ ID NO: 1847 - protein, 735 aa, Artificial Sequence
  Synthetic Polypeptide
MAADGYLPDWPEDTLSEGIRQWWKLKPGPPPPKPAERHKDDSRGLVLPGYKYLGPFNGLDKGEPVNEADAAALEHDKAYDRQLDSGDNPYLKYNHADAEFQERLKEDTSFGGNLGRAVFQAKKRVLEPLGLVEEPVKTAPGKKRPVEHSPVEPDSSSGTGKAGQQPARKRLNFGQTGDADSVPDPQPLGQPPAAPTSLGSTTMATGSGAPMADNNEGADGVGNSSGNWHCDSQWLGDRVITTSTRTWALPTYNNHLYKQISSQSGASNDNHYFGYSTPWGYFDFNRFHCHFSPRDWQRLINNNWGFRPKRLNFKLFNIQVKEVTQNDGTTTIANNLTSTVQVFTDSEYQLPYVLGSAHQGCLPPFPADVFMVPQYGYLTLNNGSQAVGRSSFYCLEYFPSQMLRTGNNFTFSYTFEDVPFHSSYAHSQSLDRLMNPLIDQYLYYLNKTQSNSGTLQQSRLLFSQAGPTSMSLQAKNWLPGPCYRQQRLSKQANDNNNSNFPWTAATKYHLNGRDSLVNPGPAMASHKDDEEKFFPMHGTLIFGKQGTNANDADLDNVMITDEEEIRTTNPVATEQYGTVSNNLQNSNTGPTTGTVNHQGALPGMVWQDRDVYLQGPIWAKIPHTDGHFHPSPLMGGFGLKHPPPQIMIKNTPVPANPPTNFSSAKFASFITQYSTGQVSVEIEWELQKENSKRWNPEIQYTSNYNKSVNVDFTVDTNGVYSEPRPIGTRYLTRNL

SEQ ID NO: 1848 - protein, 735 aa, Artificial Sequence
  Synthetic Polypeptide
MAADGYLPDWLEDTLSEGIRQWWKLKPGPPPPKPAERHKDDSRGLVLPGYKYLGPFNGLDKGEPVNEADAAALEHDKAYDRQLDSGDNPYLKYNHADAEFQERLKEDTSFGGNLGRAVFQAKKRVLEPLGLVEEPVKTAPGKKRPVEHSPVEPDSSSGTGKAGQQPARKRLNFGQTGDADSVPDPQPLGQPPAAPTSLGSTTMATGSGAPMADNNEGADGVGNSSGNWHCDSQWLGDRVITTSTRTWALPTYNNHLYKQISSQSGASNDNHYFGYSTPWGYFDFNRFHCHFSPRDWQRLINNNWGFRPKRLNFKLFNIQVKEVTQNDGTTTIANNLTSTVQVFTDSEYQLPYVLGSAHQGCLPPFPADVFMVPQYGYLTLNNGSQAVGRSSFYCLEYFPSQMLRTGNNFTFSYTFEDVPFHSSYAHSQSLDRLMNPLIDQYLYYLNKTQSNSGTLQQSRLLFSQAGPTSMSLQAKNWLPGPCYRQQRLSKQANDNNNSNFPWTAATKYHLNGRDSLVNPGPAMASHKDDEEKFFPMHGTLIFGKQGTNANDADLDNVMITDEEEIRTTNPVATEQYGTVSNNLQNSNTGPTTGTVNHQGALPGMVWQDRGVYLQGPIWAKIPHTDGHFHPSPLMGGFGLKHPPPQIMIKNTPVPANPPTNFSSAKFASFITQYSTGQVSVEIEWELQKENSKRWNPEIQYTSNYNKSVNVDFTVDTNGVYSEPRPIGTRYLTRNL

SEQ ID NO: 1849 - protein, 735 aa, Artificial Sequence
  Synthetic Polypeptide
MAADGYLPDWLEDTLSEGIRQWWKLKPGPPPPKPAERHKDDSRGLVLPGYKYLGPFNGLDKGEPVNEADAAALEHDKAYDRQLDSGDNPYLKYNHADAEFQERLKEDTSFGGNLGRAVFQAKKRVLEPLGLVEEPVKTAPGKKRPVEHSPVEPDSSSGTGKAGQQPARKRLNFGQTGDADSVPDPQPLGQPPAAPTSLGSTTMATGSGAPMADNNEGADGVGNSSGNWHCDSQWLGDRVITTSTRTWALPTYNNHLYKQISSQSGASNDNHYFGYSTPWGYFDFNRFHCHFSPRDWQRLINNNWGFRPKRLNFKLFNIQVKEVTQNDGTTTIANNLTSTVQVFTDSEYQLPYVLGSAHQGCLPPFPADVFMVPQYGYLTLNNGSQAVGRSSFYCLEYFPSQMLRTGNNFTFSYTFEDVPFHSSYAHSQSLDRLMNPLIDQYLYYLNKTQSNSGTLQQSRLLFSQAGPTSMSLQAKNWLPGPCYRQQRLSKQANDNNNSNFPWTAATKYHLNGRDSLVNPGPAMASHKDDEEKFFPMHGTLIFGKQGTNANDADLDNVMITDEEEIRTTNPVATEQYGTVSNNLQNSNTGPTTGTVNHQGALPGMVWQDRDVYLQGPIWAKIPHTDGHFHPSPLMGGFGLKHPPPQIMIKNTPVPANPPTNFSSAKFASFITQYSTGQVSVEIEWELQKENSKRWNPEIQYTSNYNKSVNVDFTVGTNGVYSEPRPIGTRYLTRNL

SEQ ID NO: 1850 - protein, 735 aa, Artificial Sequence
  Synthetic Polypeptide
MAADGYLPDWLEDTLSEGIRQWWKLKPGPPPPKPAERHQDDSRGLVLPGYKYLGPLNGLDKGEPVNEADAAALEHDKAYDRQLDSGDNPYLKYNHADAEFQERLKEDTSFGGNLGRAVFQAKKRVLEPLGLVEEPVKTAPGKKRPVEHSPAEPDSSSGTGKAGQQPARKRLNFGQTGDADSVPDPQPLGQPPAAPTSLGSTTMATGSGAPMADNNEGADGVGNSSGNWHCDSQWLGDRVITTSTRTWALPTYNNHLYKQISSQSGASNDNHYFGYSTPWGYFDFNRFHCHFSPRDWQRLINNNWGFRPKRLNFKLFNIQVKEVTQNDGTTTIANNLTSTVQVFTDSEYQLPYVLGSAHQGCLPPFPADVFMVPQYGYLTLNNGSQAVGRSSFYCLEYFPSQMLRTGNNFTFSYTFEDVPFHSSYAHSQSLDRLMNPLIDQYLYYLNRTQSNSGTLQQSRLLFSQAGPTSMSLQAKNWLPGPCYRQQRLSKQANDNNNSNFPWTAATKYHLNGRDSLVNPGPAMASHKDDEEKFFPMHGTLIFGKQGTNANDADLEHVMITDEEEIRTTNPVATEQYGNVSNNLQNSNTGPTTENVNHQGALPGMVWQDRDVYLQGPIWAKIPHTDGHFHPSPLMGGFGLKHPPPQIMIKNTPVPANPPTNFSAAKFASFITQYSTGQVSVEIEWELQKENSKRWNPEIQYTSNYNKSVNVDFTVDTNGVYSEPRPIGTRYLTRNL

SEQ ID NO: 1851 - protein, 735 aa, Artificial Sequence
  Synthetic Polypeptide
MAADGYLPDWLEDTLSEGIRQWWKLKPGPPPPKPAERHQDDSRGLVLPGYKYLGPFNGLDKGEPVNEADAAALEHDKAYDRQLDSGDNPYLKYNHADAEFQERLKEDTSFGGNLGRAVFQAKKRVLEPLGLVEEPVKTAPGKKRPVEHSPAEPDSSSGTGKAGQQPARKRLNFGQTGDADSVPDPQPLGQPPAAPTSLGSTTMATGSGAPMADNNEGADGVGNSSGNWHCDSQWLGDRVITTSTRTWALPTYNNHLYKQISSQSGASNDNHYFGYSTPWGYFDFNRFHCHFSPRDWQRLINNNWGFRPKRLNFKLFNIQVKEVTQNDGTTTIANNLTSTIQVFTDSEYQLPYVLGSAHQGCLPPFPADVFMVPQYGYLTLNNGSQAVGRSSFYCLEYFPSQMLRTGNNFTFSYTFEDVPFHSSYAHSQSLDRLMNPLIDQYLYYLNRTQSNSGTLQQSRLLFSQAGPTSMSLQAKNWLPGPCYRQQRLSKQANDNNNSNFPWTAATKYHLNGRDSLVNPGPAMASHKDDEEKFFPMHGTLIFGKQGTNANDADLEHVMITDEEEIRTTNPVATEQYGNVSNNLQNSNTGPTTENVNHQGALPGMVWQDRDVYLQGPIWAKIPHTDGHFHPSPLMGGFGLKHPPPQIMIKNTPVPANPPTNFSAAKFASFITQYSTGQVSVEIEWELQKENSKRWNPEIQYTSNYNKSVNVDFTVDTNGVYSEPRPIGTRYLTRNL

SEQ ID NO: 1852 - protein, 735 aa, Artificial Sequence
  Synthetic Polypeptide
MAADGYLPDWLEDTLSEGIRQWWKLKPGPPPPKPAERHQDDSRGLVLPGYKYLGPFNGLDKGEPVNEADAAALEHDKAYDRQLDSGDNPYLKYNHADAEFQERLKEDTSFGGNLGRAVFQAKKRVLEPLGLVEEPVKTAPGKKRPVGHSPAEPDSSSGTGKAGQQPARKRLNFGQTGDADSVPDPQPLGQPPAAPTSLGSTTMATGSGAPMADNNEGADGVGNSSGNWHCDSQWLGDRVITTSTRTWALPTYNNHLYKQISSQSGASNDNHYFGYSTPWGYFDFNRFHCHFSPRDWQRLINNNWGFRPKRLNFKLFNIQVKEVTQNDGTTTIANNLTSTVQVFTDSEYQLPYVLGSAHQGCLPPFPADVFMVPQYGYLTLNNGSQAVGRSSFYCLEYFPSQMLRTGNNFTFSYTFEDVPFHSSYAHSQSLDRLMNPLIDQYLYYLNRTQSNSGTLQQSRLLFSQAGPTSMSLQAKNWLPGPCYRQQRLSKQANDNNNSNFPWTAATKYHLNGRDSLVNPGPAMASHKDDEEKFFPMHGTLIFGKQGTNANDADLEHVMITDEEEIRTTNPVATEQYGNVSNNLQNSNTGPTTENVNHQGALPGMVWQDRDVYLQGPIWAKIPHTDGHFHPSPLMGGFGLKHPPPQIMIKNTPVPANPPTNFSAAKFASFITQYSTGQVSVEIEWELQKENSKRWNPEIQYTSNYNKSVNVDFTVDTNGVYSEPRPIGTRYLTRNL

SEQ ID NO: 1853 - protein, 735 aa, Artificial Sequence
  Synthetic Polypeptide
MAADGYLPDWLEDTLSEGIRQWWKLKPGPPPPKPAERHQDDSRGLVLPGYKYLGPFNGLDKGEPVNEADAAALEHDKAYDRQLDSGDNPYLKYNHADAEFQERLKEDTSFGGNLGRAVFQAKKRVLEPLGLVEEPVKTAPGKKRPVEHSPAEPDSSSGTGKAGQQPARKRLNFGQTGDADSVPDPQPLGQPPAAPTSLGSTTMATGSGAPMADNNEGADGVGNSSGNWHCDSQWLGDRVITTSTRTWALPTYNNHLYKQISSQSGASNDNHYFGYSTPWGYFDFNRFHCHFSPRDWQRLINNNWGFRPKRLNFKLFNIQVKEVTQNDGTTTIANNLTSTVQVFTDSEYQLPYVLGSAHQGCLPPFPADVFMVPQYGYLTLNNGSQAVGRSSFYCLEYFPSQMLRTGNNFTFSYTFEDVPFHSSYAHSQSLDRLMNPLIDQYLYYLNRTQSNSGTLQQSRLLFSQAGPTSMSLQAKNWLPGPCYRQQRLSKQANDNNNSNFPWTAATKYHLNGRDSLVNPGPAMASHKDDEEKFFPMHGTLIFGKQGTNANDADLEHVMITDEEEIRTTNPVATEQYGNVSNNLQNSNTGPTTENVNHQGALPGMVWQDRDVYLQGPIWAKIPHTDGHFHPSPLMGGFGLKHPPPQIMIKNTPVPANPPTNFSAAKFASFITQYSTGQVSVEIERELQKENSKRWNPEIQYTSNYNKSVNVDFTVDTNGVYSEPRPIGTRYLTRNL

SEQ ID NO: 1854 - protein, 735 aa, Artificial Sequence
  Synthetic Polypeptide
MAADGYLPDWLEDTLSEGIRQWWKLKPGPPPPKPAERHQDDSRGLVLPGYKYLGPFNGLDKGEPVNEADAAALEHDKAYDRQLDSGDNPYLKYNHADAEFQERLKEDTSFGGNLGRAVFQAKKRVLEPLGLVEEPVKTAPGKKRPVEHSPAEPDSSSGTGKAGQQPARKRLNFGQTGDADSVPDPQPLGQPPAAPTSLGSTTMATGSGAPMADNNEGADGVGNSSGNWHCDSQWLGDRVITTSTRTWALPTYNNHLYKQISSQSGASNDNHYFGYSTPWGYFDFNRFHCHFSPRDWQRLINNNWGFRPKRLNFKLFNIQVKEVTQNDGTTTIANNLTSTVQVFTDSEYQLPYVLGSAHQGCLPPFPADVFMVPQYGYLTLNNGSQAVGRSSFYCLEYFPSQMLRTGNNFTFSYTFEDVPFHSSYAHSQSLDRLMNPLIDQYLYYLNRTQSNSGTLQQSRLLFSQAGPTSMSLQAKNWLPGPCYRQQRLSKQANDNNNSNFPWTAATKYHLNGRDSLVNPGPAMASHKDDEEKFFPMHGTLIFGKQGTNANDADLEHVMITDEEEIRTTNPVATEQYGNVSNNLQNSNTGPTTENVNHQGALPGMVWQDRDVYLQGPIWAKIPHTDGHFHPSPLMGGFGLKHPPPQIMIKNTPVPANPPTNFSAAKFASFITQYSTGQVSVEIEWELQKENSKRWNPEIQYTSNYNKSVNVDLTVDTNGVYSEPRPIGTRYLTRNL

SEQ ID NO: 1855 - protein, 735 aa, Artificial Sequence
  Synthetic Polypeptide
MAADGYLPDWLEDTLSEGIRQWWKLKPGPPPPKPAERHKDDSRGLVLPGYKYLGPFNGLDKGEPVNEADAAALEHDKAYDRQLDSGDNPYLKYNHADAEFQERLKEDTSFGGNLGRAVFQAKKRVLEPLGLVEEPVKTAPGKKRPVEHSPVEPDSSSGTGKAGQQPARKRLNFGQTGDADSVPDPQPLGQPPAAPTSLGSTTMATGSGAPMADNNEGADGVGNSSGNWHCDSQWLGDRVITTSTRTWALPTYNNHLYKQISSQSGASNDNHYFGHSTPWGYFDFNRFHCHFSPRDWQRLINNNWGFRPKRLNFKLFNIQVKEVTQNDGTTTIANNLTSTVQVFTDSEYQLPYVLGSAHQGCLPPFPADVFMVPQYGYLTLNNGSQAVGRSSFYCLEYFPSQMLRTGNNFTFSYTFEDVPFHSSYAHSQSLDRLMNPLIDQYLYYLNKTQSNSGTLQQSRLLFSQAGPTSMSLQAKNWLPGPCYRQQRLSKQANDNNNSNFPWTAATKYHLNGRDSLVNPGPAMASHKDDEEKFFPMHGTLIFGKQGTNANDADLDNVMITDEEEIRTTNPVATEQYGTVSNNLQNSNTGPTTGTVNHQGALPGMVWQDRDVYLQGPIWAKIPHTDGHFHPSPLMGGFGLKHPPPQIMIKNTPVPANPPTNFSSAKFASFITQYSTGQVSVEIEWELQKENSKRWNPEIQYTSNYNKSVNVDFTVDTNGVYSEPRPIGTRYLTRNL

SEQ ID NO: 1856 - protein, 735 aa, Artificial Sequence
  Synthetic Polypeptide
MAADGYLPDWLEDTLSEGIRQWWKLKPGPPPPKPAERHKDDSRGLVLPGYKYLGPFNGLDKGEPVNEADAAALEHDKAYDRQLDSGDNPYLKYNHADAEFQERLKEDTSFGGNLGRAVFQAKKRVLEPLGLVEEPVKTAPGKKRPVEHSPVEPDSSSGTGKAGQQPARKRLNFGQTGDADSVPDPQPLGQPPAAPTSLGSTTMATGSGAPMADNNEGADGVGNSSGNWHCDSQWLGDRVITTSTRTWALPTYNNHLYKQISSQSGAPNDNHYFGHSTPWGYFDFNRFHCHFSPRDWQRLINNNWGFRPKRLNFKLFNIQVKEVTQNDGTTTIANNLTSTVQVFTDSEYQLPYVLGSAHQGCLPPFPADVFMVPQYGYLTLNNGSQAVGRSSFYCLEYFPSQMLRTGNNFTFSYTFEDVPFHSSYAHSQSLDRLMNPLIDQYLYYLNKTQSNSGTLQQSRLLFSQAGPTSMSLQAKNWLPGPCYRQQRLSKQANDNNNSNFPWTAATKYHLNGRDSLVNPGPAMASHKDDEEKFFPMHGTLIFGKQGTNANDADLDNVMITDEEEIRTTNPVATEQYGTVSNNLQNSNTGPTTGTVNHQGALPGMVWQDRDVYLQGPIWAKIPHTDGHFHPSPLMGGFGLKHPPPQIMIKNTPVPANPPTNFSSAKFASFITQYSTGQVSVEIEWELQKENSKRWNPEIQYTSNYNKSVNVDFTVDTNGVYSEPRPIGTRYLTRNL

SEQ ID NO: 1857 - protein, 735 aa, Artificial Sequence
  Synthetic Polypeptide
MAADGYLPDWLEDTLSEGIRQWWKLKPGPPPPKPAERHKDDSRGLVLPGYKYLGPFNGLDKGEPVNEADAAALEHDKAYDRQLDSGDNPYLKYNHADAEFQERLKEDTSFGGNLGRAVFQAKKRVLEPLGLVEEPVKTAPGKKRPVEHSPVEPDSSSGTGKAGQQPARKRLNFGQTGDADSVPDPQPLGQPPAAPTSLGSTTMATGSGAPMADNNEGADGVGNSSGNWHCDSQWLGDRVITTSTRTWALPTYNNHLYKQISSQSGASNDNHYFGHSTPWGYFDFNRFHCHFSPRDWQRLINNNWGFRPKRLNFKLFNIQVKEVTQNDGTTTIANNLTSTVQVFTDSEYQLPYVLGSAHQGCLPPFPADVFMVPQYGYLTLNNGSQAVGRSSFYCLEYFPSQMLRTGNNFTFSYTFEDVPFHSSYAHSQSLDRLMNPLIDQYLYYLNKTQSNSGTLQQSRLLFSQAGPTSMSLQAKNWLPGPCYRQQRLSKQANDNNNSNFPWTAATKYHLNGRDSLVNPGPAMASHKDDEEKFFPMHGTLIFGKQGTNANDADLDNVMITDEEEIRTTNPVATEQYGTVSNNLQNSNTGPTTGTVNHQGALPGMVWQDRDVYLQGPIWAKIPHTDGHFHPSPLMGGFGLKHPPPQIMIKNTPVPANPPTNFSSAKFASFITQYSTGQVGVEIEWELQKENSKRWNPEIQYTSNYNKSVNVDFTVDTNGVYSEPRPIGTRYLTRNL

SEQ ID NO: 1858 - protein, 735 aa, Artificial Sequence
  Synthetic Polypeptide
MAADGYLPDWLEDTLSEGIRQWWKLKPGPPPPKPAERHKDDSRGLVLPGYKYLGPFNGLDKGEPVNEADAAALEHDKAYDRQLDSGDNPYLKYNHADAEFQERLKEDTSFGGNLGRAVFQAKKRVLEPLGLVEEPVKTAPGKKRPVEHSPVEPDSSSGTGKAGQQPARKRLNFGQTGDADSVPDPQPLGQPPAAPTSLGSTTMATGSGAPMADNNEGADGVGNSSGNWHCDSQWLGDRVITTSTRTWALPTYNNHLYKQISSQSGASNDNHYFGHSTPWGYFDFNRFHCHFSPRDWQRLINNNWGFRPKRLNFKLFNIQVKEVTQNDGTTTIANNLTSTVQVFTDSEYQLPYVLGSAHQGCLPPFPADVFMVPQYGYLTLNNGSQAVGRSSFYCLEYFPSQMLRTGNNFTFSYTFEDVPFHSSYAHSQSLDRLMNPLIDQYLYYLNKTNNQSGTFTQSRLLFSQAGPTSILFKSKNWLPGPCYRQQRLSKRANDNNNSNFPWTAATKYHLNGRDSLVNPGPAMASHKDDEEKFFPQHGTLIFGKQGTKLTDADLDNVMITDEEEIRTTNPVATEQYGTVSNNLQKLNILATTGTVNTQGALPGMVWQDRDVYLQGPIWAKIPHTDGHFHPSPLMGGFGLKHPPPQIMIKNTPVPANPPTNFSSAKFASFITQYSTGQVSVEIEWELQKENSKRWNPEIQYTSNYNKSVNVDFTVDTNGVYSEPRPIGTRYLTRNL

SEQ ID NO: 1859 - protein, 735 aa, Artificial Sequence
  Synthetic Polypeptide
MAADGYLPDWLEDTLSEGIRQWWKLKPGPPPPKPAERHKDASRGLVLPGYKYLGPFNGLDKGEPVNEADAAALEHDKAYDRQLDSGDNPYLKYNHADAEFQERLKEDTSFGGNLGRAVFQAKKRVLEPLGLVEEPVKTAPGKKRPVEHSPVEPDSSSGTGKAGQQPARKRLNFGQTGDADSVPDPQPLGQPPAAPTSLGSTTMATGSGAPMADNNEGADGVGNSSGNWHCDSQWLGDRVITTSTRTWALPTYNNHLYKQISSQSGASNDNHYFGYSTPWGYFDFNRFHCHFSPRDWQRLINNNWGFRPKRLNFKLFNIQVKEVTQNDGTTTIANNLTSTVQVFTDSEYQLPYVLGSAHQGCLPPFPADVFMVPQYGYLTLNNGSQAVGRSSFYCLEYFPSQMLRTGNNFTFSYTFEDVPFHSSYAHSQSLDRLMNPLIDQYLYYLNKTNNQSGTFTQSRLLFSQAGPTSILFKSKNWLPGPCYRQQRLSKTANDNNNSNFPWTAATKYHLNGRDSLVNPGPAMASHKDDEEKFFPQHGTLIFGKQGTKLTDADLDNVMITDEEEIRTTNPVATEQYGTVSNNLQKLNILATTGTVNTQGALPGMVWQDRDVYLQGPIWAKIPHTDGHFHPSPLMGGFGLKHPPPQIMIKNTPVPANPPTNFSSAKFASFITQYSTGQVSVEIEWELQKENSKRWNPEIQYTSNYNKSVNVDFTVDTNGVYSEPRPIGTRYLTRNL

SEQ ID NO: 1860 - protein, 735 aa, Artificial Sequence
  Synthetic Polypeptide
MAADGYLPDWLEDTLSEGIRQWWKLKPGPPPPKPAERHKDDSRGLVLPGYKYLGPFNGLDKGEPVNEADAAALEHDKAYDRQLDSGDNPYLKYNHADAEFQERLKEDTSFGGNLGRAVFQAKKRVLEPLGLVEEPVKTAPGKKRPVEHSPVEPDSSSGTGKAGQQPARKRLNFGQTGDADSVPDPQPLGQPPAAPTSLGSTTMATGSGAPMADNNEGADGVGNSSGNWHCDSQWLGDRVITTSTRTWALPTYNNHLYKQISSQSGASNDNHYFGHSTPWGYFDFNRFHCHFSPRDWQRLINNNWGFRPKRLNFKLFNIQVKEVTQNDGTTTIANNLTSTVQVFTDSEYQLPYVLGSAHQGCLPPFPADVFMVPQYGYLTLNNGSQAVGRSSFYCLEYFPSQMLRTGNNFTFSYTFEDVPFHSSYAHSQSLDRLMNPLIDQYLYYLNKTNNQSGTFTQSRLLFSQAGPTSILFKSKNWLPGPCYRQQRLSKTANDNNNSNFPWTAATKYHLNGRDSLVNPGPAMASHKDDEEKFFPQHGTLIFGKQGTKLTDADLDNVMITDEEEIRTTNPVATEQYGTVSNNLQKLNILATTGTVNTQGALPGMVWQDRDVYLQGPIWAKIPHTDGHFHPSPLMGGFGLKHPPPQIMIKNTPVPANPPTNFSSAKFASFITQYSTGQVSVEIEWELQKENSKRWNPEIQYTSNYNKSVNVDFTVDTNGVYSEPRPIGTRYLTRNL

SEQ ID NO: 1861 - protein, 735 aa, Artificial Sequence
  Synthetic Polypeptide
MAADGYLPDWLEDTLSEGIRQWWKLKPGPPPPKPAERHQDDSRGLVLPGYKYLGPFNGLDKGEPVNEADAAALEHDKAYDRQLDSGDNPYLKYNHADAEFQERLKEDTSFGGNLGRAVFQAKKRVLEPLGLVEEPVKTAPGKKRPVEHSPAEPDSSSGTGKAGQQPARKRLNFGQTGDADSVPDPQPLGQPPAAPTSLGSTTMATGSGAPMADNNEGADGVGNSSGNWHCDSQWLGDGVITTSTRTWALPTYNNHLYKQISSQSGASNDNHYFGYSTPWGYFDFNRFHCHFSPRDWQRLINNNWGFRPKRLNFKLFNIQVKEVTQNDGTTTIANNLTSTVQVFTDSEYQLPYVLGSAHQGCLPPFPADVFMVPQYGYLTLNNGSQAVGRSSFYCLEYFPSQMLRTGNNFTFSYTFEDVPFHSSYAHSQSLDRLMNPLIDQYLYYLNRTQSNSGTLQQSRLLFSQAGPTSMSLQAKNWLPGPCYRQQRLSKQANDNNNSNFPWTAATKYHLNGRDSLVNPGPAMASHKDDEEKFFPMHGTLIFGKQGTNANDADLEHVMITDEEEIRTTNPVATEQYGNVSNNLQNSNTGPTTENVNHQGALPGMVWQDRDVYLQGPIWAKIPHTDGHFHPSPLMGGFGLKHPPPQIMIKNTPVPANPPTNFSAAKFASFITQYSTGQVSVEIEWELQKENSKRWNPEIQYTSNYNKSVNVDFTVDTNGVYSEPRPIGTRYLTRNL

SEQ ID NO: 1862 - protein, 735 aa, Artificial Sequence
  Synthetic Polypeptide
MAADGYLPDWLEDTLSEGIRQWWKLKPGPPPPKPAERHQDDSRGLVLPGYKYLGPFNGLDKGEPVNEADAAALEHDKAYDRQLDSGDNPYLKYNHADAEFQERLKEDTSFGGNLGRAVFQAKKRVLEPLGLVEEPVKTAPGKKRPVEHSPAEPDSSSGTGKAGQQPARKRLNFGQTGDADSVPDPQPLGQPPAAPTSLGSTTMATGSGAPMADNNEGADGVGNSSGNWHCDSQWLGDRVITTSTRTWALPTYNNHLYKQISSQSGASNDNHYFGYSTPWGYFDFNRFHCHFSPRDWQRLINNNWGFRPKRLNFKLFNIQVKEVTQNDGTTTIANNLTSTVQAFTDSEYQLPYVLGSAHQGCLPPFPADVFMVPQYGYLTLNNGSQAVGRSSFYCLEYFPSQMLRTGNNFTFSYTFEDVPFHSSYAHSQSLDRLMNPLIDQYLYYLNRTQSNSGTLQQSRLLFSQAGPTSMSLQAKNWLPGPCYRQQRLSKQANDNNNSNFPWTAATKYHLNGRDSLVNPGPAMASHKDDEEKFFPMHGTLIFGKQGTNANDADLEHVMITDEEEIRTTNPVATEQYGNVSNNLQNSNTGPTTENVNHQGALPGMVWQDRDVYLQGPIWAKIPHTDGHFHPSPLMGGFGLKHPPPQIMIKNTPVPANPPTNFSAAKFASFITQYSTGQVSVEIEWELQKENSKRWNPEIQYTSNYNKSVNVDFTVDTNGVYSEPRPIGTRYLTRNL

SEQ ID NO: 1863 - protein, 735 aa, Artificial Sequence
  Synthetic Polypeptide
MAADGYLPDWLEDTLSEGIRQWWKLKPGPPPPKPAERHQDDSRGLVLPGYKYLGPFNGLDKGEPVNEADAAALEHDKAYDRQLDSGDNPYLKYNHADAEFQERLKEDTSFGGNLGRAVFQAKKRVLEPLGLVEEPVKTAPGKKRPVEHSPAEPDSSSGTGKAGQQPARKRLNFGQTGDADSVPDPQPLGQPPAAPTSLGSTTMATGSGAPMADNNEGADGVGNSSGNWHCDSQWLGDRVITTSTRTWALPTYNNHLYKQISSQSGASNDNHYFGYSTPWGYFDFNRFHCHFSPRDWQRLINNNWGFRPKRLNFKLFNIQVKEVTQNDGTTTIANNLTSTVQVFTDSEYQLPYVLGSAHQGCLPPFPADVFMVPQYGYLTLNNGSQAVGRSSFYCLEYFPSQMLRTGNNFTFSYTFEDVPFHSSYAHSQSLDRLMNPLIDQYLYYLNRTQSNSGTLQQSRLLFSQAGPTSMSLQAKNWLPGPCYRQQRLSKQANDNNNSNFPWTAATKYHLNGRDSLVNPGPAMASHKDDEEKFFPMHGTLIFGKQGTNANDADLEHVMITDEEEIRTTNPVATEQYGNVSNNLQNSNTGPTTENVNHQGALPGMVWQDRDVYLQGPIWAKIPHTDGHFHPSPLMGGFGLKHPPPQIMIKNTPVPANPPTNFSAAKFASFITQYSTGQVSVEIEWELQKGNSKRWNPEIQYTSNYNKSVNVDFTVDTNGVYSEPRPIGTRYLTRNL

SEQ ID NO: 1864 - protein, 735 aa, Artificial Sequence
  Synthetic Polypeptide
MAADGYLPDWLEDTLSEGIRQWWKLKPGPPPPKPAERHQDDSRGLVLPGYKYLGPFNGLDKGEPVNEADAAALEHDKAYDRQLDSGDNPYLKYNHADAEFQERLKEDTSFGGNLGRAVFQAKKRVLEPLGLVEEPVKTAPGKKRPVEHSPAEPDSSSGTGKAGQQPARKRLNFGQTGDADSVPDPQPLGQPPAAPTSLGSTTMATGSGAPMADNNEGADGVGNSSGNWHCDSQWLGDRVITTSTRTWALPTYNNHLYKQISSQSGASNDNHYFGYSTPWGYFDFNRFHCHFSPRDWQRLINNNWGFRPKRLNFKLFNIQVKEVTQNDGTTTIANNLTSTVQVFTDSEYQLPYVLGSAHQGCLPPFPADVFMVPQYGYLTLNNGSQAVGRSSFYCLEYFPSQMLRTGNNFTFSYTFEDVPFHSSYAHSQSLDRLMNPLIDQYLYYLNRTQSNSGTLQQSRLLFSQAGPTSMSLQAKNWLPGPCYRQQRLSKQANDNNNSNFPWTAATKYHLNGRDSLVNPGPAMASHKDDEEKFFPMHGTLIFGKQGTNANDADLEHVMITDEEEIRTTNPVATEQYGNVSNNLQNSNTGPTTENVNHQGALPGMVWQDRDVYLQGPIWAKIPHTDGHFHPSPLMGGFGLKHPPPQIMIKNTPVPANPPTNFSAAKFASFITQYSTGQVSVEIEWGLQKENSKRWNPEIQYTSNYNKSVNVDFTVDTNGVYSEPRPIGTRYLTRNL

SEQ ID NO: 1865 - protein, 735 aa, Artificial Sequence
  Synthetic Polypeptide
MAADGYLPDWLEDTLSEGIRQWWKLKPGPPPPKPAERHQDDSRGLVLPGYKYLGPFNGLDKGEPVNEADAAALEHDKAYDRQLDSGDNPYLKYNHADAEFQERLKEDTSFGGNLGRAVFQAKKRVLEPLGLVEEPVKTAPGKKRPVEHSPAEPDSSSGTGKAGQQPARKRLNFGQTGDADSVPDPQPLGQPPAAPTSLGSTTMATGSGAPMADNNEGADGVGNSSGNWHCDSQWLGDRVITTSTRTWALPTYNNHLYKQISSQSGASNDNHYFGYSTPWGYFDFNRFHCHFSPRDWQRLINNNWGFRPKRLNFKLFNIQVKEVTQNDGTTTIANNLTSTVQVFTDSEYQLPYVLGSAHQGCLPPFPADVFMVPQYGYLTLNNGSQAVGRSSFYCLEYFPSQMLRTGNNFTFSYTFEDVPFHSSYAHSQSLDRLMNPLIDQYLYYLNRTRSNSGTLQQSRLLFSQAGPTSMSLQAKNWLPGPCYRQQRLSKQANDNNNSNFPWTAATKYHLNGRDSLVNPGPAMASHKDDEEKFFPMHGTLIFGKQGTNANDADLEHVMITDEEEIRTTNPVATEQYGNVSNNLQNSNTGPTTENVNHQGALPGMVWQDRDVYLQGPIWAKIPHTDGHFHPSPLMGGFGLKHPPPQIMIKNTPVPANPPTNFSAAKFASFITQYSTGQVSVEIEWELQKENSKRWNPEIQYTSNYNKSVNVDFTVDTNGVYSEPRPIGTRYLTRNL

SEQ ID NO: 1866 - protein, 735 aa, Artificial Sequence
  Synthetic Polypeptide
MAADGYLPDWLEDTLSEGIRQWWKLKPGPPPPKPAERHQDDSRGLVLPGYKYLGPFNGLDKGEPVNEADAAALEHDKAYDRQLDSGDNPYLKYNHADAEFQERLKEDTSFGGNLGRAVFQAKKRVLEPLGLVEEPVKTAPGKKRPVEHSPAEPDSSSGTGKAGQQPARKRLNFGQTGDADSVPDPQPLGQPPAAPTSLGSTTMATGSGAPMADNNEGADGVGNSSGNWHCDSQWLGDRVITTSTRTWALPTYNNHLYKQISSQSGASNDNHYFGYSTPWGYFDFNRFHCHFSPRDWQRLINNNWGFRPKRLNFKLFNIQVKEVTQNDGTTTIANNLTSTVQVFTDSEYQLPYVLGSAHQGCLPPFPADVFMVPQYGYLTLNNGSQAVGRSSFYCLEYFPSQMLRTGNNFTFSYTFEDVPFHSSYAHSQSLDRLMNPLIDQYLYYLNRTQSNSGTLQQSRLLFSQAGPTSMSLQAKNWLPGPCYRQQRLSKQANDNNNSNFPWTAATKYHLNGRDSLVNPGPAMASHKDDEEKFFPMHGTLIFGKQGTNANDADLEHVMITDEEEIRTTNPVATEQYGNVSNNLQNSNTGPTTENVNHQGALPGMVWQDRGVYLQGPIWAKIPHTDGHFHPSPLMGGFGLKHPPPQIMIKNTPVPANPPTNFSAAKFASFITQYSTGQVSVEIEWELQKENSKRWNPEIQYTSNYNKSVNVDFTVDTNGVYSEPRPIGTRYLTRNL

SEQ ID NO: 1867 - protein, 735 aa, Artificial Sequence
  Synthetic Polypeptide
MAADGYLPDWLEDTLSEGIRQWWKLKPGPPPPKPAERHQDDSRGLVLPGYKYLGPFNGLDKGEPVNEADAAALEHDKAYDRQLDSGDNPYLKYNHADAEFQERLKEDTSFGGNLGRAVFQAKKRVLEPLGLVEEPVKTAPGKKRPVEHSPAEPDSSSGTGKAGQQPARKRLNFGQTGDADSVPDPQPLGQPPAAPTSLGSTTMATGSGAPMADNNEGADGVGNSSGNWHCDSQWLGDRVITTSTRTWALPTYNNHLYKQISSQSGASNDNHYFGYSTPWGYFDFNRFHCHFSPRDWQRLINNNWGFRPKRLNFKLFNIQVKEVTQNGGTTTIANNLTSTVQVFTDSEYQLPYVLGSAHQGCLPPFPADVFMVPQYGYLTLNNGSQAVGRSSFYCLEYFPSQMLRTGNNFTFSYTFEDVPFHSSYAHSQSLDRLMNPLIDQYLYYLNRTQSNSGTLQQSRLLFSQAGPTSMSLQAKNWLPGPCYRQQRLSKQANDNNNSNFPWTAATKYHLNGRDSLVNPGPAMASHKDDEEKFFPMHGTLIFGKQGTNANDADLEHVMITDEEEIRTTNPVATEQYGNVSNNLQNSNTGPTTENVNHQGALPGMVWQDRDVYLQGPIWAKIPHTDGHFHPSPLMGGFGLKHPPPQIMIKNTPVPANPPTNFSAAKFASFITQYSTGQVSVEIEWELQKENSKRWNPEIQYTSNYNKSVNVDFTVDTNGVYSEPRPIGTRYLTRNL

SEQ ID NO: 1868 - protein, 735 aa, Artificial Sequence
  Synthetic Polypeptide
MAADGYLPDWLEDTLSEGIRQWWKLKPGPPPPKPAERHQDDSRGLVLPGYKYLGPFNGLDKGEPVNEADAAALEHDKAYDRQLDSGDNPYLKYNHADAEFQERLKEDTSFGGNLGRAVFQAKKRVLEPLGLVEEPVKTAPGKKRPVEHSPAEPDSSSGTGKAGQQPARKRLNFGQTGDADSVPDPQPLGQPPAAPTSLGSTTMATGSGAPMADNNEGADGVGNSSGNWHCDSQWLGDRVITTSTRTWALPTYNNHLYKQISSQSGASNDNHYFGYSTPWGYFDFNRFHCHFSPRDWQRLINNNWGFRPKRLNFKLFNIQVKEVTQNDGTTTIANNLTSTVQVFTDSEYQLPYVLGSAHQGCLPPFPADVFMVPQYGYLTLNNGSQAVGRSSFYCLEYFPSQMLRTGNNFTFSYTFEDVPFHSSYAHSQSLDRLMNPLIDQYLYYLNRTQSNSGTLQQSRLLFSQAGPTSMSLQAKNWLPGPCYRQQRLSKQANDNNNSNFPWTAATKYHLNGRDSLVNPGPAMASHKDDEEKFFPMHGTLIFGKQGTNANDADLEHVMITDEEEIRTTNPVATEQYGNVSNNLQNSNTGPTTENVNHQGALPGMVWQDRDVYLQGPIWAKIPHTDGHFHPSPLMGGFGLKHPPPQIMIKNTPVPANPPTNFSAAKFASFITQYSTGQVSVEIEWELRKENSKRWNPEIQYTSNYNKSVNVDFTVDTNGVYSEPRPIGTRYLTRNL

SEQ ID NO: 1869 - protein, 735 aa, Artificial Sequence
  Synthetic Polypeptide
MAADGYLPDWLEDTLSEGIRQWWKLKPGPPPPKPAERHQDDSRGLVLPGYKYLGPFNGLDKGEPVNEADAAALEHDKAYDRQLDSGDNPYLKYNHADAEFQERLKEDTSFGGNLGRAVFQAKRRVLEPLGLVEEPVKTAPGKKRPVEHSPAEPDSSSGTGKAGQQPARKRLNFGQTGDADSVPDPQPLGQPPAAPTSLGSTTMATGSGAPMADNNEGADGVGNSSGNWHCDSQWLGDRVITTSTRTWALPTYNNHLYKQISSQSGASNDNHYFGYSTPWGYFDFNRFHCHFSPRDWQRLINNNWGFRPKRLNFKLFNIQVKEVTQNDGTTTIANNLTSTVQVFTDSEYQLPYVLGSAHQGCLPPFPADVFMVPQYGYLTLNNGSQAVGRSSFYCLEYFPSQMLRTGNNFTFSYTFEDVPFHSSYAHSQSLDRLMNPLIDQYLYYLNRTQSNSGTLQQSRLLFSQAGPTSMSLQAKNWLPGPCYRQQRLSKQANDNNNSNFPWTAATKYHLNGRDSLVNPGPAMASHKDDEEKFFPMHGTLIFGKQGTNANDADLEHVMITDEEEIRTTNPVATEQYGNVSNNLQNSNTGPTTENVNHQGALPGMVWQDRDVYLQGPIWAKIPHTDGHFHPSPLMGGFGLKHPPPQIMIKNTPVPANPPTNFSAAKFASFITQYSTGQVSVEIEWELQKENSKRWNPEIQYTSNYNKSVNVDFTVDTNGVYSEPRPIGTRYLTRNL

SEQ ID NO: 1870 - protein, 735 aa, Artificial Sequence
  Synthetic Polypeptide
MAADGYLPDWLEDTLSEGIRQWWKLKPGPPPPKPAERHQDDSRGLVLPGYKYLGPFNGLDKGEPVNEADAAALEHDKAYDRQLDSGDNPYLKYNHADAELQERLKEDTSFGGNLGRAVFQAKKRVLEPLGLVEEPVKTAPGKKRPVEHSPAEPDSSSGTGKAGQQPARKRLNFGQTGDADSVPDPQPLGQPPAAPTSLGSTTMATGSGAPMADNNEGADGVGNSSGNWHCDSQWLGDRVITTSTRTWALPTYNNHLYKQISSQSGASNDNHYFGYSTPWGYFDFNRFHCHFSPRDWQRLINNNWGFRPKRLNFKLFNIQVKEVTQNDGTTTIANNLTSTVQVFTDSEYQLPYVLGSAHQGCLPPFPADVFMVPQYGYLTLNNGSQAVGRSSFYCLEYFPSQMLRTGNNFTFSYTFEDVPFHSSYAHSQSLDRLMNPLIDQYLYYLNRTQSNSGTLQQSRLLFSQAGPTSMSLQAKNWLPGPCYRQQRLSKQANDNNNSNFPWTAATKYHLNGRDSLVNPGPAMASHKDDEEKFFPMHGTLIFGKQGTNANDADLEHVMITDEEEIRTTNPVATEQYGNVSNNLQNSNTGPTTENVNHQGALPGMVWQDRDVYLQGPIWAKIPHTDGHFHPSPLMGGFGLKHPPPQIMIKNTPVPANPPTNFSAAKFASFITQYSTGQVSVEIEWELQKENSKRWNPEIQYTSNYNKSVNVDFTVDTNGVYSEPRPIGTRYLTRNL

SEQ ID NO: 1871 - protein, 735 aa, Artificial Sequence
  Synthetic Polypeptide
MAADGYLPDWLEDTLSEGIRQWWKLKPGPPPPKPAERHQDDSRGLVLPGYKYLGPFNGLDKGEPVNEADAAALEHDKAYDRQLDSGDNPYLKYNHADAEFQERLKEDTSFGGNLGRAVFQAKKRVLEPLGLVEEPVKTAPGKKRPVEHSPAEPDSSSGTGKAGQQPARKRLNFGQTGDADSVPDPQPLGQPPAAPTSLGSTTMATGSGAPMADNNEGADGVGNSSGNWHCDSQWLGGRVITTSTRTWALPTYNNHLYKQISSQSGASNDNHYFGYSTPWGYFDFNRFHCHFSPRDWQRLINNNWGFRPKRLNFKLFNIQVKEVTQNDGTTTIANNLTSTVQVFTDSEYQLPYVLGSAHQGCLPPFPADVFMVPQYGYLTLNNGSQAVGRSSFYCLEYFPSQMLRTGNNFTFSYTFEDVPFHSSYAHSQSLDRLMNPLIDQYLYYLNRTQSNSGTLQQSRLLFSQAGPTSMSLQAKNWLPGPCYRQQRLSKQANDNNNSNFPWTAATKYHLNGRDSLVNPGPAMASHKDDEEKFFPMHGTLIFGKQGTNANDADLEHVMITDEEEIRTTNPVATEQYGNVSNNLQNSNTGPTTENVNHQGALPGMVWQDRDVYLQGPIWAKIPHTDGHFHPSPLMGGFGLKHPPPQIMIKNTPVPANPPTNFSAAKFASFITQYSTGQVSVEIEWELQKENSKRWNPEIQYTSNYNKSVNVDFTVDTNGVYSEPRPIGTRYLTRNL

SEQ ID NO: 1872 - protein, 735 aa, Artificial Sequence
  Synthetic Polypeptide
MAADGYLPDWLEDTLSEGIRQWWKLKPGPPPPKPAERHQDDSRGLVLPGYKYLGPFNGLDKGEPVNEADAAALEHDKAYDRQLDSGDNPYLKYNHADAEFQERLKEDTSFGGNLGRAVFQAKKRVLEPLGLVEEPVKTAPGKKRPVEHSPAEPDSSSGTGKAGQQPARKRLNFGQTGDADSVPDPQPLGQPPAAPTSLGSTTMATGSGAPMADNNEGADGVGNSSGNWHCDSQWLGDRVITTSTRTWALPTYNNHLYKQISSQSGASNDNHYFGYSTPWGYFDFNRFHCHFSPRDWQRLINNNWGFRPKRLNFKLFNIQVKEVTQNDGTTTIANNLTSTVQVFTDSEYQLPYVLGSAHQGCLPPLPADVFMVPQYGYLTLNNGSQAVGRSSFYCLEYFPSQMLRTGNNFTFSYTFEDVPFHSSYAHSQSLDRLMNPLIDQYLYYLNRTQSNSGTLQQSRLLFSQAGPTSMSLQAKNWLPGPCYRQQRLSKQANDNNNSNFPWTAATKYHLNGRDSLVNPGPAMASHKDDEEKFFPMHGTLIFGKQGTNANDADLEHVMITDEEEIRTTNPVATEQYGNVSNNLQNSNTGPTTENVNHQGALPGMVWQDRDVYLQGPIWAKIPHTDGHFHPSPLMGGFGLKHPPPQIMIKNTPVPANPPTNFSAAKFASFITQYSTGQVSVEIEWELQKENSKRWNPEIQYTSNYNKSVNVDFTVDTNGVYSEPRPIGTRYLTRNL

SEQ ID NO: 1873 - protein, 735 aa, Artificial Sequence
  Synthetic Polypeptide
MAADGYLPDWLEDTLSEGIRQWWKLKPGPPPPKPAERHQDDSRGLVLPGYKYLGPFNGLDKGEPVNEADAAALEHDKAYDRQLDSGDNPYLKYNHADAEFQERLKEDTSFGGNLGRAVFQAKKRVLEPLGLVEEPVKTAPGKKRPVEHSPAEPDSSSGTGKAGQQPARKRLNFGQTGDADSVPDPQPLGQPPAAPTSLGSTAMATGSGAPMADNNEGADGVGNSSGNWHCDSQWLGDRVITTSTRTWALPTYNNHLYKQISSQSGASNDNHYFGYSTPWGYFDFNRFHCHFSPRDWQRLINNNWGFRPKRLNFKLFNIQVKEVTQNDGTTTIANNLTSTVQVFTDSEYQLPYVLGSAHQGCLPPFPADVFMVPQYGYLTLNNGSQAVGRSSFYCLEYFPSQMLRTGNNFTFSYTFEDVPFHSSYAHSQSLDRLMNPLIDQYLYYLNRTQSNSGTLQQSRLLFSQAGPTSMSLQAKNWLPGPCYRQQRLSKQANDNNNSNFPWTAATKYHLNGRDSLVNPGPAMASHKDDEEKFFPMHGTLIFGKQGTNANDADLEHVMITDEEEIRTTNPVATEQYGNVSNNLQNSNTGPTTENVNHQGALPGMVWQDRDVYLQGPIWAKIPHTDGHFHPSPLMGGFGLKHPPPQIMIKNTPVPANPPTNFSAAKFASFITQYSTGQVSVEIEWELQKENSKRWNPEIQYTSNYNKSVNVDFTVDTNGVYSEPRPIGTRYLTRNL

SEQ ID NO: 1874 - protein, 735 aa, Artificial Sequence
  Synthetic Polypeptide
MAADGYLPDWLEDTLSEGIRQWWKLKPGPPPPKPAERHQDDSRGLVLPGYKYLGPFNGLDKGEPVNEADAAALEHDKAYDRQLDSGDNPYLKYNHADAEFQERLKEDTSFGGNLGRAVFQAKKRVLEPLGLVEEPVKTAPGKKRPVEHSPAEPDSSSGTGKAGQQPARKRLNFGQTGDADSVPDPQPLGQPPAAPTSLGSTTMATGSGAPMADNNEGADGVGNSSGNWHCDSQWLGDRVITTSTRTWALPTYNNHLYKQISSQSGASNDNHYFGYSTPWGYFDFNRFHCHFSPRDWQRLINNNWGFRPKRLNFKLFNIQVKEVTQNDGTTTIANNLTSTVQVFTDSEYQLPYVLGSAHQGCLPPFPADVFMVPQYGYLTLNNGSQAVGRSSFYCLEYFPSQMLRTGNNFTFSYTFEDVPFHSSYAHSQSLDRLMNPLIDQYLYYLNRTQSNSGTLQQSRLLFSQAGPTSMSLQAKNWLPGPCYRQQRLSRQANDNNNSNFPWTAATKYHLNGRDSLVNPGPAMASHKDDEEKFFPMHGTLIFGKQGTNANDADLEHVMITDEEEIRTTNPVATEQYGNVSNNLQNSNTGPTTENVNHQGALPGMVWQDRDVYLQGPIWAKIPHTDGHFHPSPLMGGFGLKHPPPQIMIKNTPVPANPPTNFSAAKFASFITQYSTGQVSVEIEWELQKENSKRWNPEIQYTSNYNKSVNVDFTVDTNGVYSEPRPIGTRYLTRNL

SEQ ID NO: 1875 - protein, 735 aa, Artificial Sequence
  Synthetic Polypeptide
MAADGYLPDWLEDTLSEGIRQWWKLKPGPPPPKPAERHQDDSRGLVLPGYKYLGPFNGLDKGEPVNEADAAALEHDKAYDRQLGSGDNPYLKYNHADAEFQERLKEDTSFGGNLGRAVFQAKKRVLEPLGLVEEPVKTAPGKKRPVEHSPAEPDSSSGTGKAGQQPARKRLNFGQTGDADSVPDPQPLGQPPAAPTSLGSTTMATGSGAPMADNNEGADGVGNSSGNWHCDSQWLGDRVITTSTRTWALPTYNNHLYKQISSQSGASNDNHYFGYSTPWGYFDFNRFHCHFSPRDWQRLINNNWGFRPKRLNFKLFNIQVKEVTQNDGTTTIANNLTSTVQVFTDSEYQLPYVLGSAHQGCLPPFPADVFMVPQYGYLTLNNGSQAVGRSSFYCLEYFPSQMLRTGNNFTFSYTFEDVPFHSSYAHSQSLDRLMNPLIDQYLYYLNRTQSNSGTLQQSRLLFSQAGPTSMSLQAKNWLPGPCYRQQRLSKQANDNNNSNFPWTAATKYHLNGRDSLVNPGPAMASHKDDEEKFFPMHGTLIFGKQGTNANDADLEHVMITDEEEIRTTNPVATEQYGNVSNNLQNSNTGPTTENVNHQGALPGMVWQDRDVYLQGPIWAKIPHTDGHFHPSPLMGGFGLKHPPPQIMIKNTPVPANPPTNFSAAKFASFITQYSTGQVSVEIEWELQKENSKRWNPEIQYTSNYNKSVNVDFTVDTNGVYSEPRPIGTRYLTRNL

SEQ ID NO: 1876 - protein, 735 aa, Artificial Sequence
  Synthetic Polypeptide
MAADGYLPDWLEDTLSEGIRQWWKLKPGPPPPKPAERHQDDSRGLVLPGYKYLGPFNGLDKGEPVNEADAAALEHDKAYDRQLDSGDNPYLKYNHADAEFQERLKEDTSFGGNLGRAVFQAKKRVLEPLGLVEEPVKTAPGKKRPVEHSPAEPDSSSGTGKAGQQPARKRLNFGQTGDADSVPDPQPLGQPPAAPTSLGSTTMATGSGAPMADNNEGADGVGNSSGNWHCDSQWLGDRVITTSTRTWALPTYNNHLYKQISSQSGASNDNHYFGYSTPWGYFDFNRFHCHFSPRDWQRLINNNWGFRPKRLNFKLFNIQVKEVTQNDGTTTIANNLTSTVQVFTDSEYQLPYVLGSAHQGCLPPFPADVFMVPQYGYLTLNNGSQAVGRSSFYCLEYFPSQMLRTGNNFTFSYTFEDVPFHSSYAHSQSLDRLMNPLIDQYLHYLNRTQSNSGTLQQSRLLFSQAGPTSMSLQAKNWLPGPCYRQQRLSKQANDNNNSNFPWTAATKYHLNGRDSLVNPGPAMASHKDDEEKFFPMHGTLIFGKQGTNANDADLEHVMITDEEEIRTTNPVATEQYGNVSNNLQNSNTGPTTENVNHQGALPGMVWQDRDVYLQGPIWAKIPHTDGHFHPSPLMGGFGLKHPPPQIMIKNTPVPANPPTNFSAAKFASFITQYSTGQVSVEIEWELQKENSKRWNPEIQYTSNYNKSVNVDFTVDTNGVYSEPRPIGTRYLTRNL

SEQ ID NO: 1877 - protein, 735 aa, Artificial Sequence
  Synthetic Polypeptide
MAADGYLPDWLEDTLSEGIRQWWKLKPGPPPPKPAERHQDDSRGLVLPGYKYLGPFNGLDKGEPVNEADAAALEHDKAYDRQLDSGDNPYLKYNHADAEFQERLKEDTSFGGNLGRAVFQAKKRVLEPLGLVEEPVKTAPGKKRPVEHPPAEPDSSSGTGKAGQQPARKRLNFGQTGDADSVPDPQPLGQPPAAPTSLGSTTMATGSGAPMADNNEGADGVGNSSGNWHCDSQWLGDRVITTSTRTWALPTYNNHLYKQISSQSGASNDNHYFGYSTPWGYFDFNRFHCHFSPRDWQRLINNNWGFRPKRLNFKLFNIQVKEVTQNDGTTTIANNLTSTVQVFTDSEYQLPYVLGSAHQGCLPPFPADVFMVPQYGYLTLNNGSQAVGRSSFYCLEYFPSQMLRTGNNFTFSYTFEDVPFHSSYAHSQSLDRLMNPLIDQYLYYLNRTQSNSGTLQQSRLLFSQAGPTSMSLQAKNWLPGPCYRQQRLSKQANDNNNSNFPWTAATKYHLNGRDSLVNPGPAMASHKDDEEKFFPMHGTLIFGKQGTNANDADLEHVMITDEEEIRTTNPVATEQYGNVSNNLQNSNTGPTTENVNHQGALPGMVWQDRDVYLQGPIWAKIPHTDGHFHPSPLMGGFGLKHPPPQIMIKNTPVPANPPTNFSAAKFASFITQYSTGQVSVEIEWELQKENSKRWNPEIQYTSNYNKSVNVDFTVDTNGVYSEPRPIGTRYLTRNL

SEQ ID NO: 1878 - protein, 735 aa, Artificial Sequence
  Synthetic Polypeptide
MAADGYLPDWLEDTLSEGIRQWWKLKPGPPPPKPAERHQDDSRGLVLPGYKYLGPFNGLDKGEPVNEADAAALEHDKAYDRQLDSGDNPYLKYNHADAEFQERLKEDTSFGGNLGRAVFQAKKRVLEPLGLVEEPVKTAPGKKRPVEHSPAEPDSSSGTGKAGQQPARKRLNFGQTGDADSVPDPQPLGQPPAAPTSLGSTTMATGSGAPMADNNEGADGVGNSSGNWHCDSQWLGDRVITTSTRTWALPTYNNHLYKQISSQSGASNDNHYFGYSTPWGYFDFNRFHCHFSPRDWQRLINNNWGFRPKRLNFKLFNIQVKEVTQNDGTTTIANNLTSTVQVFTDSEYQLPYVLGSAHQGCLPPFPADVFMVPQYGYLTLNNGSQAVGRSSFYCLEYFPSQMLRTGNNFTFSYTFEDVPFHSSYAHSQSLDRLMNPLIDQYLYYLNRTQSNSGTLQQSRLLFSQAGPTSMSLQAKNWLPGPCYRQQRLSKQANDNNNSNFPWTAATKYHLNGRDSLVNPGPAMASHKDDEEKFFPMHGTLIFGKQGTNANDADLEHVMITDEEEIRTTNPVATEQYGNVSNNLQNSNTGPTTENVNHQGALPGMVWQDRDVYLQGPIWAKIPHTDGHFHPSPLMGGFGLKHPPPQIMIKNTPVPANPPTNFSAAKFASFITQYSTGQVSVEIEWELQKENSKRWNPEIQYTSNYNKSVNVDFTADTNGVYSEPRPIGTRYLTRNL

SEQ ID NO: 1879 - protein, 735 aa, Artificial Sequence
  Synthetic Polypeptide
MAADGYLPDWLEDTLSEGIRQWWKLKPGPPPPKPAERHQDDSRGLVLPGYKYLGPFNGLDKGEPVNEADAAALEHDKAYDRQLDSGDNPYLKYNHADAEFQERLKEDTSFGGNLGRAVFQAKKRVLEPLGLVEEPVKTAPGKKRPVEHSPAEPDSSSGTGKAGQQPARKRLNFGQTGDADSVPDPQPLGQPPAAPTSLGSTTMATGSGAPMADNNEGADGVGNSSGNWHCDSQWLGDRVITTSTRTWALPTYNNHLYKQISSQSGASNDNHYFGYSTPWGYFDFNRFHCHFSPRDWQRLINNNWGFRPKRLNFKLFNIQVKEVTQNDGTTTIANNLTSTVQVFTDSEYQLPYVLGSAHQGCLPPFPADVFMVPQYGYLTLNNGSQAVGRSSFYCLEYFPSQMLRTGNNFTFSYTFEDVPFHSSYAHSQSLDRLMNPLIDQYLYYLNRTQSNSGTLRQSRLLFSQAGPTSMSLQAKNWLPGPCYRQQRLSKQANDNNNSNFPWTAATKYHLNGRDSLVNPGPAMASHKDDEEKFFPMHGTLIFGKQGTNANDADLEHVMITDEEEIRTTNPVATEQYGNVSNNLQNSNTGPTTENVNHQGALPGMVWQDRDVYLQGPIWAKIPHTDGHFHPSPLMGGFGLKHPPPQIMIKNTPVPANPPTNFSAAKFASFITQYSTGQVSVEIEWELQKENSKRWNPEIQYTSNYNKSVNVDFTVDTNGVYSEPRPIGTRYLTRNL

SEQ ID NO: 1880 - protein, 735 aa, Artificial Sequence
  Synthetic Polypeptide
MAADGYLPDWLEDTLSEGIRQWWKLKPGPPPPKPAERHQDDSRGLVLPGYKYLGPFNGLDKGEPVNEADAAALEHDKAYDRQLDSGDNPYLKYNHADAEFQERLKEDTSFGGNLGRAVFQAKKRVLEPLGLVEEPVKTAPGKKRPVEHSPAEPDSSSGTGKAGQQPARKRLNFGQTGDADSVPDPQPLGQPPAAPTSLGSTTMATGSGAPMADNNEGADGVGNSSGNWHCDSQWLGDRVITTSTRTWALPTYNNHLYKQISSQSGASNDNHYFGYSTPWGYFDFNRFHCHFSPRDWQRLINNNWGFRPKRLNFKLFNIQVKEVTQNDGTTTIANNLTSTVQVFTDSEYQLPYVLGSAHQGCLPPFPADVFMVPQYGYLTLNNGSQAVGRSSFYCLEYFPSQMLRTGNNFTFSYTFEDVPFHSSYAHSQSLDRLMNPLIDQYLYYLNRTQSNSGTLQQSRLLFSQAGPTSMSLQAKNWLPGPCYRQQRLSKQANDNNNSNFPWTAATKYHLNGRDSLVNPGPAMASHKDDEEKFFPMHGTLIFGKQGTNANDADLEHVMITDEEEIRTTNPVATEQYGNVSNNLQNSNTGPTTENVNHQGALPGMVWQDRDVYLQGPIWAKIPHTDGHFHPSPLMGGFGLKHPPPQIMIKNTPVPANPPTNFSAAKFASFITQYSTGRVSVEIEWELQKENSKRWNPEIQYTSNYNKSVNVDFTVDTNGVYSEPRPIGTRYLTRNL

SEQ ID NO: 1881 - protein, 735 aa, Artificial Sequence
  Synthetic Polypeptide
MAADGYLPDWLEDTLSEGIRQWWKLKPGPPPPKPAERHQDDSRGLVLPGYKYLGPFNGLDKGEPVNEADAAALEHDKAYDRQLDSGDNPYLKYNHADAEFQERLKEDTSFGGNLGRAVFRAKKRVLEPLGLVEEPVKTAPGKKRPVEHSPAEPDSSSGTGKAGQQPARKRLNFGQTGDADSVPDPQPLGQPPAAPTSLGSTTMATGSGAPMADNNEGADGVGNSSGNWHCDSQWLGDRVITTSTRTWALPTYNNHLYKQISSQSGASNDNHYFGYSTPWGYFDFNRFHCHFSPRDWQRLINNNWGFRPKRLNFKLFNIQVKEVTQNDGTTTIANNLTSTVQVFTDSEYQLPYVLGSAHQGCLPPFPADVFMVPQYGYLTLNNGSQAVGRSSFYCLEYFPSQMLRTGNNFTFSYTFEDVPFHSSYAHSQSLDRLMNPLIDQYLYYLNRTQSNSGTLQQSRLLFSQAGPTSMSLQAKNWLPGPCYRQQRLSKQANDNNNSNFPWTAATKYHLNGRDSLVNPGPAMASHKDDEEKFFPMHGTLIFGKQGTNANDADLEHVMITDEEEIRTTNPVATEQYGNVSNNLQNSNTGPTTENVNHQGALPGMVWQDRDVYLQGPIWAKIPHTDGHFHPSPLMGGFGLKHPPPQIMIKNTPVPANPPTNFSAAKFASFITQYSTGQVSVEIEWELQKENSKRWNPEIQYTSNYNKSVNVDFTVDTNGVYSEPRPIGTRYLTRNL

SEQ ID NO: 1882 - protein, 735 aa, Artificial Sequence
  Synthetic Polypeptide
MAADGYLPDWLEDTLSEGIRQWWKPKPGPPPPKPAERHQDDSRGLVLPGYKYLGPFNGLDKGEPVNEADAAALEHDKAYDRQLDSGDNPYLKYNHADAEFQERLKEDTSFGGNLGRAVFQAKKRVLEPLGLVEEPVKTAPGKKRPVEHSPAEPDSSSGTGKAGQQPARKRLNFGQTGDADSVPDPQPLGQPPAAPTSLGSTTMATGSGAPMADNNEGADGVGNSSGNWHCDSQWLGDRVITTSTRTWALPTYNNHLYKQISSQSGASNDNHYFGYSTPWGYFDFNRFHCHFSPRDWQRLINNNWGFRPKRLNFKLFNIQVKEVTQNDGTTTIANNLTSTVQVFTDSEYQLPYVLGSAHQGCLPPFPADVFMVPQYGYLTLNNGSQAVGRSSFYCLEYFPSQMLRTGNNFTFSYTFEDVPFHSSYAHSQSLDRLMNPLIDQYLYYLNRTQSNSGTLQQSRLLFSQAGPTSMSLQAKNWLPGPCYRQQRLSKQANDNNNSNFPWTAATKYHLNGRDSLVNPGPAMASHKDDEEKFFPMHGTLIFGKQGTNANDADLEHVMITDEEEIRTTNPVATEQYGNVSNNLQNSNTGPTTENVNHQGALPGMVWQDRDVYLQGPIWAKIPHTDGHFHPSPLMGGFGLKHPPPQIMIKNTPVPANPPTNFSAAKFASFITQYSTGQVSVEIEWELQKENSKRWNPEIQYTSNYNKSVNVDFTVDTNGVYSEPRPIGTRYLTRNL

SEQ ID NO: 1883 - protein, 735 aa, Artificial Sequence
  Synthetic Polypeptide
MAADGYLPDWLEDTLSEGIRQWWKLKPGPPPPKPAERHQDDSRGLVLPGYKYLGPFNGLDKGEPVNEADAAALEHDKAYDRQLDSGDNPYLKYNHADAEFQERLKEDTSFGGNLGRAVFQAKKRVLEPLGLVEEPVKTAPGKKRPVEHSPAEPDSSSGTGKAGQQPARKRLNFGQTGDADSVPDPQPLGQPPAAPTSLGSTTMATGSGAPMADNNEGADGVGNSSGNWHCDSQWLGDRVITTSTRTWALPTYNNHLYKQISSQSGASNDNHYFGYSTPWGYFDFNRFHCHFSPRDWQRLINNNWGFRPKRLNFKLFNIQVKEVTQNDGTTTIANNLTSTVQVFTDSEYQLPYVLGSAHQGCLPPFPADVFMVPQYGYLTLNNGSQAVGRSSFYCLEYFPSQMLRTGNNFTFSYTFEDVPFHSSYAHSQSLDRLMNPLIDQYLYYLNRTQSNSGTLQQSRLLFSQAGPTSMSLQAKNWLPGPCYRQQRLSKQANDNNNSNFPWTAATKYHLNGRDSLVNPGPAMASHKDDEEKFFPMHGTLIFGKQGTNANDADLEHVMITDEEEIRTTNPVATEQYGNVSNNLQNSNTGPTTENANHQGALPGMVWQDRDVYLQGPIWAKIPHTDGHFHPSPLMGGFGLKHPPPQIMIKNTPVPANPPTNFSAAKFASFITQYSTGQVSVEIEWELQKENSKRWNPEIQYTSNYNKSVNVDFTVDTNGVYSEPRPIGTRYLTRNL

SEQ ID NO: 1884 - protein, 735 aa, Artificial Sequence
  Synthetic Polypeptide
MAADGYLPDWLEDTPSEGIRQWWKLKPGPPPPKPAERHQDDSRGLVLPGYKYLGPFNGLDKGEPVNEADAAALEHDKAYDRQLDSGDNPYLKYNHADAEFQERLKEDTSFGGNLGRAVFQAKKRVLEPLGLVEEPVKTAPGKKRPVEHSPAEPDSSSGTGKAGQQPARKRLNFGQTGDADSVPDPQPLGQPPAAPTSLGSTTMATGSGAPMADNNEGADGVGNSSGNWHCDSQWLGDRVITTSTRTWALPTYNNHLYKQISSQSGASNDNHYFGYSTPWGYFDFNRFHCHFSPRDWQRLINNNWGFRPKRLNFKLFNIQVKEVTQNDGTTTIANNLTSTVQVFTDSEYQLPYVLGSAHQGCLPPFPADVFMVPQYGYLTLNNGSQAVGRSSFYCLEYFPSQMLRTGNNFTFSYTFEDVPFHSSYAHSQSLDRLMNPLIDQYLYYLNRTQSNSGTLQQSRLLFSQAGPTSMSLQAKNWLPGPCYRQQRLSKQANDNNNSNFPWTAATKYHLNGRDSLVNPGPAMASHKDDEEKFFPMHGTLIFGKQGTNANDADLEHVMITDEEEIRTTNPVATEQYGNVSNNLQNSNTGPTTENVNHQGALPGMVWQDRDVYLQGPIWAKIPHTDGHFHPSPLMGGFGLKHPPPQIMIKNTPVPANPPTNFSAAKFASFITQYSTGQVSVEIEWELQKENSKRWNPEIQYTSNYNKSVNVDFTVDTNGVYSEPRPIGTRYLTRNL

SEQ ID NO: 1885 - protein, 735 aa, Artificial Sequence
  Synthetic Polypeptide
MAADGYLPDWLEDTLSEGIRQWWKLKPGPPPPKPAERHQDDSRGLVLPGYKYLGPFNGLDKGEPVNEADAAALEHDKAYDRQLDSGDNPYLKYNHADAEFQERLKEDTSFGGNLGRAVFQAKKRVLEPLGLVEEPVKTAPGKKRPVEHSPAEPDSSSGTGKAGQQPARKRLNFGQTGDADSVPDPQPLGQPPAAPTSLGSTTMATGSGAPMADNNEGADGVGNSSGNWHCDSQWLGDRVITTSTRTWALPTYNNHLYKQISSQSGASNDNHYFGYSTPWGYFDFNRFHCHFSPRDWQRLINNNWGFRPKRLNFRLFNIQVKEVTQNDGTTTIANNLTSTVQVFTDSEYQLPYVLGSAHQGCLPPFPADVFMVPQYGYLTLNNGSQAVGRSSFYCLEYFPSQMLRTGNNFTFSYTFEDVPFHSSYAHSQSLDRLMNPLIDQYLYYLNRTQSNSGTLQQSRLLFSQAGPTSMSLQAKNWLPGPCYRQQRLSKQANDNNNSNFPWTAATKYHLNGRDSLVNPGPAMASHKDDEEKFFPMHGTLIFGKQGTNANDADLEHVMITDEEEIRTTNPVATEQYGNVSNNLQNSNTGPTTENVNHQGALPGMVWQDRDVYLQGPIWAKIPHTDGHFHPSPLMGGFGLKHPPPQIMIKNTPVPANPPTNFSAAKFASFITQYSTGQVSVEIEWELQKENSKRWNPEIQYTSNYNKSVNVDFTVDTNGVYSEPRPIGTRYLTRNL

SEQ ID NO: 1886 - protein, 735 aa, Artificial Sequence
  Synthetic Polypeptide
MAADGYLPDWLEDTLSEGIRQWWKLKPGPPPPKPAERHQDDSRGLVLPGYKYLGPFNGLDKGEPVNEADAAALEHDKAYDRQLDSGDNPYLKYNHADAEFQERLKEDTSFGGNLGRAVFQAKKRVLEPLGLVEEPVKTAPGKKRPVEHSPAEPDSSSGTGKAGQQPARKRLNFGQAGDADSVPDPQPLGQPPAAPTSLGSTTMATGSGAPMADNNEGADGVGNSSGNWHCDSQWLGDRVITTSTRTWALPTYNNHLYKQISSQSGASNDNHYFGYSTPWGYFDFNRFHCHFSPRDWQRLINNNWGFRPKRLNFKLFNIQVKEVTQNDGTTTIANNLTSTVQVFTDSEYQLPYVLGSAHQGCLPPFPADVFMVPQYGYLTLNNGSQAVGRSSFYCLEYFPSQMLRTGNNFTFSYTFEDVPFHSSYAHSQSLDRLMNPLIDQYLYYLNRTQSNSGTLQQSRLLFSQAGPTSMSLQAKNWLPGPCYRQQRLSKQANDNNNSNFPWTAATKYHLNGRDSLVNPGPAMASHKDDEEKFFPMHGTLIFGKQGTNANDADLEHVMITDEEEIRTTNPVATEQYGNVSNNLQNSNTGPTTENVNHQGALPGMVWQDRDVYLQGPIWAKIPHTDGHFHPSPLMGGFGLKHPPPQIMIKNTPVPANPPTNFSAAKFASFITQYSTGQVSVEIEWELQKENSKRWNPEIQYTSNYNKSVNVDFTVDTNGVYSEPRPIGTRYLTRNL

SEQ ID NO: 1887 - protein, 735 aa, Artificial Sequence
  Synthetic Polypeptide
MAADGYLPDWLEDTLSEGIRQWWKLKPGPPPPKPAERHQDDSRGLVLPGYKYLGPFNGLDKGEPVNEADAAALEHDKAYDRQLDSGDNPYLKYNHADAEFQERLKEDTSFGGNLGRAVFQAKKRVLEPLGLVEEPVKTAPGKKRPVEHSPAEPDSSSGTGKAGQQPARKRLNFGQTGDADSVPDPQPLGQPPAAPTSLGSTTVATGSGAPMADNNEGADGVGNSSGNWHCDSQWLGDRVITTSTRTWALPTYNNHLYKQISSQSGASNDNHYFGYSTPWGYFDFNRFHCHFSPRDWQRLINNNWGFRPKRLNFKLFNIQVKEVTQNDGTTTIANNLTSTVQVFTDSEYQLPYVLGSAHQGCLPPFPADVFMVPQYGYLTLNNGSQAVGRSSFYCLEYFPSQMLRTGNNFTFSYTFEDVPFHSSYAHSQSLDRLMNPLIDQYLYYLNRTQSNSGTLQQSRLLFSQAGPTSMSLQAKNWLPGPCYRQQRLSKQANDNNNSNFPWTAATKYHLNGRDSLVNPGPAMASHKDDEEKFFPMHGTLIFGKQGTNANDADLEHVMITDEEEIRTTNPVATEQYGNVSNNLQNSNTGPTTENVNHQGALPGMVWQDRDVYLQGPIWAKIPHTDGHFHPSPLMGGFGLKHPPPQIMIKNTPVPANPPTNFSAAKFASFITQYSTGQVSVEIEWELQKENSKRWNPEIQYTSNYNKSVNVDFTVDTNGVYSEPRPIGTRYLTRNL

SEQ ID NO: 1888 - protein, 735 aa, Artificial Sequence
  Synthetic Polypeptide
MAADGYLPDWLEDTLSEGIRQWWKLKPGPPPPKPAERHQDDSRGLVLPGYKYLGPFNGLDKGEPVNEADAAALEHDKAYDRQLDSGDNPYLKYNHADAEFQERLKEDTSFGGNLGRAVFQAKKRVLEPLGLVEEPVKTAPGKKRPVEHSPAEPDSSSGTGKAGQQPARKRLNFGQTGDADSVPDPQPLGQPPAAPTSLGSTTMATGSGAPMADNNEGADGVGNSSGNWHCDSQWLGDRVITTSTRTWALPTYNNHLYKQISSQSGASNDNHYFGYSTPWGYFDFNRFHCHFSPRDWQRLINNNWGFRPKRLNFKLFNIQVKEVTQNDGTTTIANNLTSTVQVFTDSEYQLPYVLGSAHQGCLPPFPADVFMVPQYGYLTLNNGSQAVGRSSFYCLEYFPSQMLRTGNNFTFSYTFEDVPFHSSYAHSQSLDRLMNPLIDQYLYYLNRTQSNSGTLQQSRLLFSQAGPTSMSLQAKNWLPGPCYRQQRLSKQANDNNNSNFPWTAATKYHLNGRDSLVNPGPAMASHKGDEEKFFPMHGTLIFGKQGTNANDADLEHVMITDEEEIRTTNPVATEQYGNVSNNLQNSNTGPTTENVNHQGALPGMVWQDRDVYLQGPIWAKIPHTDGHFHPSPLMGGFGLKHPPPQIMIKNTPVPANPPTNFSAAKFASFITQYSTGQVSVEIEWELQKENSKRWNPEIQYTSNYNKSVNVDFTVDTNGVYSEPRPIGTRYLTRNL

SEQ ID NO: 1889 - protein, 735 aa, Artificial Sequence
  Synthetic Polypeptide
MAADGYLPDWLEDTLSEGIRQWWKLKPGPPPPKPAERHQDDSRGLVLPGYKYLGPFNGLDKGEPVNEADAAALEHDKAYDRQLDSGDNPYLKYNHADAEFQERLKEDTSFGGNLGRAVFQAKKRVLEPLGLVEEPVKTAPGKKRPVEHSPAEPDSSSGTGKAGQQPARKGLNFGQTGDADSVPDPQPLGQPPAAPTSLGSTTMATGSGAPMADNNEGADGVGNSSGNWHCDSQWLGDRVITTSTRTWALPTYNNHLYKQISSQSGASNDNHYFGYSTPWGYFDFNRFHCHFSPRDWQRLINNNWGFRPKRLNFKLFNIQVKEVTQNDGTTTIANNLTSTVQVFTDSEYQLPYVLGSAHQGCLPPFPADVFMVPQYGYLTLNNGSQAVGRSSFYCLEYFPSQMLRTGNNFTFSYTFEDVPFHSSYAHSQSLDRLMNPLIDQYLYYLNRTQSNSGTLQQSRLLFSQAGPTSMSLQAKNWLPGPCYRQQRLSKQANDNNNSNFPWTAATKYHLNGRDSLVNPGPAMASHKDDEEKFFPMHGTLIFGKQGTNANDADLEHVMITDEEEIRTTNPVATEQYGNVSNNLQNSNTGPTTENVNHQGALPGMVWQDRDVYLQGPIWAKIPHTDGHFHPSPLMGGFGLKHPPPQIMIKNTPVPANPPTNFSAAKFASFITQYSTGQVSVEIEWELQKENSKRWNPEIQYTSNYNKSVNVDFTVDTNGVYSEPRPIGTRYLTRNL

SEQ ID NO: 1890 - protein, 735 aa, Artificial Sequence
  Synthetic Polypeptide
MAADGYLPDWLEDTLSEGIRQWWKLKPGPPPPKPAERHQDDSRGLVLPGYKYLGPFNGLDKGEPVNEADAAALEHDKAYDRQLDSGDNPYLKYNHADAEFQERLKEDTSFGGNLGRAVFQAKKRVLEPLGLVEEPVKTAPGKKRPVEHSPAEPDSSSGTGKAGQQPARKRLNFGQTGDADSVPDPQPLGQPPAAPTSLGSTTMATGSGAPMADNNEGADGVGNSSGNWHCDSQWLGDRVITTSTRTWALPTYNNHLYKQISSQSGASNDNHYFGYSTPWGYFDFNRFHCHFSPRDWQRLINNNWGFRPKRLNFKLFNIQVKEVTQNDGTATIANNLTSTVQVFTDSEYQLPYVLGSAHQGCLPPFPADVFMVPQYGYLTLNNGSQAVGRSSFYCLEYFPSQMLRTGNNFTFSYTFEDVPFHSSYAHSQSLDRLMNPLIDQYLYYLNRTQSNSGTLQQSRLLFSQAGPTSMSLQAKNWLPGPCYRQQRLSKQANDNNNSNFPWTAATKYHLNGRDSLVNPGPAMASHKDDEEKFFPMHGTLIFGKQGTNANDADLEHVMITDEEEIRTTNPVATEQYGNVSNNLQNSNTGPTTENVNHQGALPGMVWQDRDVYLQGPIWAKIPHTDGHFHPSPLMGGFGLKHPPPQIMIKNTPVPANPPTNFSAAKFASFITQYSTGQVSVEIEWELQKENSKRWNPEIQYTSNYNKSVNVDFTVDTNGVYSEPRPIGTRYLTRNL

SEQ ID NO: 1891 - protein, 735 aa, Artificial Sequence
  Synthetic Polypeptide
MAADGYLPDWLEDTLSEGIRQWWKLKPGPPPPKPAERHQDDSRGLVLPGYKYLGPFNGLDKGEPVNEADAAALEHDKAYDRQLDSGDNPYLKYNHADAEFQERLKEDTSFGGNLGRAVFQAKKRVLEPLGLVEEPVKTAPGKKRPVEHSPAEPDSSSGTGKAGQQPARRRLNFGQTGDADSVPDPQPLGQPPAAPTSLGSTTMATGSGAPMADNNEGADGVGNSSGNWHCDSQWLGDRVITTSTRTWALPTYNNHLYKQISSQSGASNDNHYFGYSTPWGYFDFNRFHCHFSPRDWQRLINNNWGFRPKRLNFKLFNIQVKEVTQNDGTTTIANNLTSTVQVFTDSEYQLPYVLGSAHQGCLPPFPADVFMVPQYGYLTLNNGSQAVGRSSFYCLEYFPSQMLRTGNNFTFSYTFEDVPFHSSYAHSQSLDRLMNPLIDQYLYYLNRTQSNSGTLQQSRLLFSQAGPTSMSLQAKNWLPGPCYRQQRLSKQANDNNNSNFPWTAATKYHLNGRDSLVNPGPAMASHKDDEEKFFPMHGTLIFGKQGTNANDADLEHVMITDEEEIRTTNPVATEQYGNVSNNLQNSNTGPTTENVNHQGALPGMVWQDRDVYLQGPIWAKIPHTDGHFHPSPLMGGFGLKHPPPQIMIKNTPVPANPPTNFSAAKFASFITQYSTGQVSVEIEWELQKENSKRWNPEIQYTSNYNKSVNVDFTVDTNGVYSEPRPIGTRYLTRNL

SEQ ID NO: 1892 - protein, 735 aa, Artificial Sequence
  Synthetic Polypeptide
MAADGYLPDWLEDTLSEGIRQWWKLKPGPPPPKPAERHQDDSRGLVLPGYKYLGPFNGLDKGEPVNEADAAALEHDKAYDRQLDSGDNPYLKYNHADAEFQERLKEDTSFGGNLGRAVFQAKKRVLEPLGLVEEPVKTAPGKKRPVEHSPAEPDSSSGTGKAGQQPARKRLNFGQTGDADSVPDPQPLGQPPAAPTSLGSTTMATGSGAPMADNNEGADGVGNSSGNWHCDSQWLGDRVITTSTRTWALPTYNNHLYKQISSQSGASNDNHYFGYSTPWGYFDFNRFHCHFSPRDWQRLINNNWGFRPKRLNFKLFNIQVKEVTQNDGTTTIANNLTSTVQVFTDSEYQLPYVLGSAHQGCLPPFPADVFMVPQYGYLTLNNGSQAVGRSSFYCLEYFPSQMLRTGNNFTFSYTFEDVPFHSSYAHSQSLDRLMNPLIDQYLYYLNRTQSNSGTLQQSRLLFSQAGPTSMSLQAKNWLPGPCYRQQRLSKQANDNNNSNFPWTAATKYHLNGRDSLVNPGPAMASHKDDEEKFFPMHGTLIFGKQGTNANDADLEHVMITDEEEIRTTNPVATEQYGNVSNNLQNSNTGPTTENVNHQGALPGMVWQDRDVYLQGPIWAKIPHTDGHFHPSPLMGGFGLKHPPPQIMIKNTPVPANPPTNFSAAKFASLITQYSTGQVSVEIEWELQKENSKRWNPEIQYTSNYNKSVNVDFTVDTNGVYSEPRPIGTRYLTRNL

SEQ ID NO: 1893 - protein, 735 aa, Artificial Sequence
  Synthetic Polypeptide
MAADGYLPDWLEDTLSEGIRQWWKLKPGPPPPKPAERHQDDSRGLVLPGYKYLGPFNGLDKGEPVNEADAAALEHDKAYDRQLDSGDNPYLKYNHADAEFQERLKEDTSFGGNLGRAVFQAKKRVLEPLGLVEEPVKTAPGKKRPVEHSPAEPDSSSGTGKAGQQPARKRLNFGQTGDADSVPDPQPLGQPPAAPTSLGSTTMATGSGAPMADNNEGADGVGNSSGNWHCDSQWLGDRVITTSTRTWALPTYNNHLYKQISSQSGASNDNHYFGYSTPWGYFDFNRFHCHFSPRDWQRLINNNWGFRPKRLSFKLFNIQVKEVTQNDGTTTIANNLTSTVQVFTDSEYQLPYVLGSAHQGCLPPFPADVFMVPQYGYLTLNNGSQAVGRSSFYCLEYFPSQMLRTGNNFTFSYTFEDVPFHSSYAHSQSLDRLMNPLIDQYLYYLNRTQSNSGTLQQSRLLFSQAGPTSMSLQAKNWLPGPCYRQQRLSKQANDNNNSNFPWTAATKYHLNGRDSLVNPGPAMASHKDDEEKFFPMHGTLIFGKQGTNANDADLEHVMITDEEEIRTTNPVATEQYGNVSNNLQNSNTGPTTENVNHQGALPGMVWQDRDVYLQGPIWAKIPHTDGHFHPSPLMGGFGLKHPPPQIMIKNTPVPANPPTNFSAAKFASFITQYSTGQVSVEIEWELQKENSKRWNPEIQYTSNYNKSVNVDFTVDTNGVYSEPRPIGTRYLTRNL

SEQ ID NO: 1894 - protein, 735 aa, Artificial Sequence
  Synthetic Polypeptide
MAADGYLPDWLEDTLSEGIRQWWKLKPGPPPPKPAERHQDDSRGLVLPGYKYLGPFNGLDKGEPVNEADAAALEHDKAYDRQLDSGDNPYLKYNHADAEFQERLKEDTSFGGNLGRAVFQAKKRVLEPLGLVEEPVKTAPGKKRPVEHSPAEPDSSSGTGKAGQQPARKRLNFGQTGDADSVPDPQPLGQPPAAPTSLGSTTMATGSGAPMADNNEGADGVGNSSGNWHCDSQWLGDRVITTSTRTWALPTYNNHLYKQISSQSGASNDNHYFGYSTPWGYFDFNRFHCHFSPRDWQRLINNNWGFRPKRLNFKLFNIQVKEVTQNDGTTTIANNLTSTVQVFTDSEYQLPYVLGSAHQGCLPPFPADVFMVPQYGYLTLNNGSQAVGRSSFYCLEYFPSQMLRTGNNFTFSYTFEDVPFHSSYAHSQSLDRLMNPLIDQYLYYLNRTQSNSGTLQQSRLLFSQAGPTSMSLQAKNWLPGPCYRQQRLSKQANDNNNSNFPWTAATKYHLNGRDSLVNPGPAMASHKDDEEKFFPMHGTLIFGKQGTNANDADLEHVMITDEEEIRTTNPVATGQYGNVSNNLQNSNTGPTTENVNHQGALPGMVWQDRDVYLQGPIWAKIPHTDGHFHPSPLMGGFGLKHPPPQIMIKNTPVPANPPTNFSAAKFASFITQYSTGQVSVEIEWELQKENSKRWNPEIQYTSNYNKSVNVDFTVDTNGVYSEPRPIGTRYLTRNL

SEQ ID NO: 1895 - protein, 735 aa, Artificial Sequence
  Synthetic Polypeptide
MAADGYLPDWLEDTLSEGIRQWWKLKPGPPPPKPAERHQDDSRGLVLPGYKYLGPFNGLDKGEPVNEADAAALEHDKAYDRQLDSGDNPYLKYNHADAEFQERLKEDTSFGGNLGRAVFQAKKRVLEPLGLVEEPVKTAPGKKRPVEHSPAEPDSSSGTGKAGQQPARKRLNFGQTGDADSVPDPQPLGQPPAAPTSLGSTTMATGSGAPMADNNEGADGVGNSSGNWHCDSQWLGDRVITTSTRTWALPTYNNHLYKQISSQSGASNDNHYFGYSTPWGYFDFNRFHCHFSPRDWQRLINNNWGFRPKRLNFKLFNIQVKEVTQNDGTTTIANNLTSTVQVFTDSEYQLPYVLGSAHQGCLPPFPADVFMVPQYGYLTLNNGSQAVGRSSFYCLEYFPSQMLRTGNNFTFSYTFEDVPFHSSYAHSQSLDRLMNPLIDQYLYYLNRTQSNSGTLQQSRLLFSQAGPTSMSLQAKNWLPGPCYRQQRLSKQANDNNNSNFPWTAATKYHLNGRDSLVNPGPAMASHKDDEEKFFPMHGTLIFGKQGTNANDADLEHVMITDEEEIRTTNPVATEQYGNVPNNLQNSNTGPTTENVNHQGALPGMVWQDRDVYLQGPIWAKIPHTDGHFHPSPLMGGFGLKHPPPQIMIKNTPVPANPPTNFSAAKFASFITQYSTGQVSVEIEWELQKENSKRWNPEIQYTSNYNKSVNVDFTVDTNGVYSEPRPIGTRYLTRNL

SEQ ID NO: 1896 - protein, 735 aa, Artificial Sequence
  Synthetic Polypeptide
MAADGYLPDWLEDTLSEGIRQWWKLKPGPPPPKPAERHQDDSRGLVLPGYKYLGPFNGLDKGEPVNEADAAALEHDKAYDRQLDSGDNPYLKYNHADAEFQERLKEDTSFGGNLGRAVFQAKKRVLEPLGLVEEPVKTAPGKKRPVEHSPAEPDSSSGTGKAGQQPARKRLNFGQTGDADSVPDPQPLGQPPAAPTSLGSTTMATGSGAPMADNNEGADGVGNSSGNWHCDSQWLGDRVITTSTRTWALPTYNNHLYKQISSQSGASNDNHYFGYSTPWGYFDFNRFHCHFSPRDWQRLINNNWGFRPKRLNFKLFNIQVKEVTQNDGTTTIANNLTSTVQVFTDSEYQLPYVLGSAHQGCLPPFPADVFMVPQYGYLTPNNGSQAVGRSSFYCLEYFPSQMLRTGNNFTFSYTFEDVPFHSSYAHSQSLDRLMNPLIDQYLYYLNRTQSNSGTLQQSRLLFSQAGPTSMSLQAKNWLPGPCYRQQRLSKQANDNNNSNFPWTAATKYHLNGRDSLVNPGPAMASHKDDEEKFFPMHGTLIFGKQGTNANDADLEHVMITDEEEIRTTNPVATEQYGNVSNNLQNSNTGPTTENVNHQGALPGMVWQDRDVYLQGPIWAKIPHTDGHFHPSPLMGGFGLKHPPPQIMIKNTPVPANPPTNFSAAKFASFITQYSTGQVSVEIEWELQKENSKRWNPEIQYTSNYNKSVNVDFTVDTNGVYSEPRPIGTRYLTRNL

SEQ ID NO: 1897 - protein, 735 aa, Artificial Sequence
  Synthetic Polypeptide
MAADGYLPDWLEDTLSEGIRQWWKLKPGPPPPKPAERHQDDSRGLVLPGYKYLGPFNGLDKGEPVNEADAAALEHDKAYDRQLDSGDNPYLKYNHADAEFQERLKEDTSFGGNLGRAAFQAKKRVLEPLGLVEEPVKTAPGKKRPVEHSPAEPDSSSGTGKAGQQPARKRLNFGQTGDADSVPDPQPLGQPPAAPTSLGSTTMATGSGAPMADNNEGADGVGNSSGNWHCDSQWLGDRVITTSTRTWALPTYNNHLYKQISSQSGASNDNHYFGYSTPWGYFDFNRFHCHFSPRDWQRLINNNWGFRPKRLNFKLFNIQVKEVTQNDGTTTIANNLTSTVQVFTDSEYQLPYVLGSAHQGCLPPFPADVFMVPQYGYLTLNNGSQAVGRSSFYCLEYFPSQMLRTGNNFTFSYTFEDVPFHSSYAHSQSLDRLMNPLIDQYLYYLNRTQSNSGTLQQSRLLFSQAGPTSMSLQAKNWLPGPCYRQQRLSKQANDNNNSNFPWTAATKYHLNGRDSLVNPGPAMASHKDDEEKFFPMHGTLIFGKQGTNANDADLEHVMITDEEEIRTTNPVATEQYGNVSNNLQNSNTGPTTENVNHQGALPGMVWQDRDVYLQGPIWAKIPHTDGHFHPSPLMGGFGLKHPPPQIMIKNTPVPANPPTNFSAAKFASFITQYSTGQVSVEIEWELQKENSKRWNPEIQYTSNYNKSVNVDFTVDTNGVYSEPRPIGTRYLTRNL

SEQ ID NO: 1898 - protein, 735 aa, Artificial Sequence
  Synthetic Polypeptide
MAADGYLPDWLEDTLSEGIRQWWKLKPGPPPPKPAERHQDDSRGLVLPGYKYLGPFNGLDKGEPVNEADAAALEHDKAYDRQLDSGDNPYLKYNHADAEFQERLKEDTSFGGNLGRAVFQAKKRVLEPLGLVEEPVKTAPGKKRPVEHSPAEPDSSSGTGKAGQQPARKRLNFGQTGDADSVPDPQPLGQPPAAPTSLGSTTMATGSGAPMADNNEGADGVGNSSGNWHCDSQWLGDRVITTSTRTWALPTYNNHLYKQISSQSGASNDNHYFGYSTPWGYFDFNRFHCHFSPRDWQRLINNNWGFRPKRLNFKLFNIQVKEVTQNDGTTTIANNLTSTVQVFTDSEYQLPYVLGSAHQGCLPPFPADVFMVPQYGYLTLNNGSQAVGRSSFYCLEYFPPQMLRTGNNFTFSYTFEDVPFHSSYAHSQSLDRLMNPLIDQYLYYLNRTQSNSGTLQQSRLLFSQAGPTSMSLQAKNWLPGPCYRQQRLSKQANDNNNSNFPWTAATKYHLNGRDSLVNPGPAMASHKDDEEKFFPMHGTLIFGKQGTNANDADLEHVMITDEEEIRTTNPVATEQYGNVSNNLQNSNTGPTTENVNHQGALPGMVWQDRDVYLQGPIWAKIPHTDGHFHPSPLMGGFGLKHPPPQIMIKNTPVPANPPTNFSAAKFASFITQYSTGQVSVEIEWELQKENSKRWNPEIQYTSNYNKSVNVDFTVDTNGVYSEPRPIGTRYLTRNL

SEQ ID NO: 1899 - protein, 735 aa, Artificial Sequence
  Synthetic Polypeptide
MAADGYLPDWLEDTLPEGIRQWWKLKPGPPPPKPAERHQDDSRGLVLPGYKYLGPFNGLDKGEPVNEADAAALEHDKAYDRQLDSGDNPYLKYNHADAEFQERLKEDTSFGGNLGRAVFQAKKRVLEPLGLVEEPVKTAPGKKRPVEHSPAEPDSSSGTGKAGQQPARKRLNFGQTGDADSVPDPQPLGQPPAAPTSLGSTTMATGSGAPMADNNEGADGVGNSSGNWHCDSQWLGDRVITTSTRTWALPTYNNHLYKQISSQSGASNDNHYFGYSTPWGYFDFNRFHCHFSPRDWQRLINNNWGFRPKRLNFKLFNIQVKEVTQNDGTTTIANNLTSTVQVFTDSEYQLPYVLGSAHQGCLPPFPADVFMVPQYGYLTLNNGSQAVGRSSFYCLEYFPSQMLRTGNNFTFSYTFEDVPFHSSYAHSQSLDRLMNPLIDQYLYYLNRTQSNSGTLQQSRLLFSQAGPTSMSLQAKNWLPGPCYRQQRLSKQANDNNNSNFPWTAATKYHLNGRDSLVNPGPAMASHKDDEEKFFPMHGTLIFGKQGTNANDADLEHVMITDEEEIRTTNPVATEQYGNVSNNLQNSNTGPTTENVNHQGALPGMVWQDRDVYLQGPIWAKIPHTDGHFHPSPLMGGFGLKHPPPQIMIKNTPVPANPPTNFSAAKFASFITQYSTGQVSVEIEWELQKENSKRWNPEIQYTSNYNKSVNVDFTVDTNGVYSEPRPIGTRYLTRNL

SEQ ID NO: 1900 - protein, 735 aa, Artificial Sequence
  Synthetic Polypeptide
MAADGYLPDWLEDTLSEGIRQWWKLKPGPPPPKPAERHQDDSRGLVLPGYKYLGPFNGLDKGEPVNEADAAALEHDKAYDRQLDSGDNPYLKYNHADAEFQERLKEDTSFGGNLGRAVFQAKKRVLEPLGLVEEPVKTAPGKKRPVEHSPAEPDSSSGTGKAGQQPARKRLNFGQTGDADSVPDPQPLGQPPAAPTSLGSTTMATGSGAPMADNNEGADGVGNSSGNWHCDSQWLGDRVITTSTRTWALPTYNNHLYKQISSQSGASNDNHYFGYSTPWGYFDFNRFHCHFSPRDWQRLINNNWGFRPKRLNFKLFNIQVKEVTQNDGTTTIANNLTSTVQVFTDSEYQLPYVLGSAHQGCLPPFPADVFMVPQYGYLTLNNGSQAVGRSSFYCLEYFPSQMLRTGNNFTFSYTFEDVPFHSSYAHSQSLDRLMNPLIDQYLYYLNRTQSNSGTLQQSRLLFSQAGPTSMSLQAKNWLPGPCYRRQRLSKQANDNNNSNFPWTAATKYHLNGRDSLVNPGPAMASHKDDEEKFFPMHGTLIFGKQGTNANDADLEHVMITDEEEIRTTNPVATEQYGNVSNNLQNSNTGPTTENVNHQGALPGMVWQDRDVYLQGPIWAKIPHTDGHFHPSPLMGGFGLKHPPPQIMIKNTPVPANPPTNFSAAKFASFITQYSTGQVSVEIEWELQKENSKRWNPEIQYTSNYNKSVNVDFTVDTNGVYSEPRPIGTRYLTRNL

SEQ ID NO: 1901 - protein, 735 aa, Artificial Sequence
  Synthetic Polypeptide
MAADGYLPDWLEDTLSEGIRQWWKLKPGPPPPKPAERHQDDSRGLVLPGYKYLGPFNGLDKGEPVNEADAAALEHDKAYDRQLDSGDNPYLKYNHADAEFQERLKEDTSFGGNLGRAVFQAKKRVLEPLGLVEEPVKTAPGKKRPVEHSPAEPDSSSGTGKAGQQPARKRLNFGQTGDADSVPDPQPLGQPPAAPTSLGSTTMATGSGAPMADNNEGADGVGNSSGNWHCDSQWLGDRVITTSTRTWALPTYNNHLYKQISSQSGASNDNHYFGYSTPWGYFDFNRFHCHFSPRDWQRLINNNWGFRPKRLNFKLFNIQVKEVTQNDGTTTIANNLTSTVQVFTDSEYQLPYVLGSAHQGCLPPFPADVFMVPQYGYLTLNNGSQAVGRSSFYCLEYLPSQMLRTGNNFTFSYTFEDVPFHSSYAHSQSLDRLMNPLIDQYLYYLNRTQSNSGTLQQSRLLFSQAGPTSMSLQAKNWLPGPCYRQQRLSKQANDNNNSNFPWTAATKYHLNGRDSLVNPGPAMASHKDDEEKFFPMHGTLIFGKQGTNANDADLEHVMITDEEEIRTTNPVATEQYGNVSNNLQNSNTGPTTENVNHQGALPGMVWQDRDVYLQGPIWAKIPHTDGHFHPSPLMGGFGLKHPPPQIMIKNTPVPANPPTNFSAAKFASFITQYSTGQVSVEIEWELQKENSKRWNPEIQYTSNYNKSVNVDFTVDTNGVYSEPRPIGTRYLTRNL

SEQ ID NO: 1902 - protein, 735 aa, Artificial Sequence
  Synthetic Polypeptide
MAADGYLPDWLEDTLSEGIRQWWKLKPGPPPPKPAERHQDDSRGLVLPGYKYLGPFNGLDKGEPVNEADAAALEHDKAYDRQLDSGDNPYLKYNHADAEFQERLKEDTSFGGNLGRAVFQAKKRVLEPLGLVEEPVKTAPGKKRPVEHSPAEPDSSSGTGKAGQQPARKRLNFGQTGDADSVPDPQPLGQPPAAPTSLGSTTMATGSGAPMADNNEGADGVGNSSGNWHCDSQWLGDRVITTSTRTWALPTYNNHLYKQISSQSGASNDNHYFGYSTPWGYFDFNRFHCHFSPRDWQRLINNNWGFRPKRLNFKLFNIQVKEVTQNDGTTTIANNLTSTVQVFTDSEYQLPYVLGSAHQGCLPPFPADVFMVPQYGYLTLNNGSQAVGRSSFYCLEYFPSQMLRTGNNFTFSYTFEDVPFHSSYAHSQSLDRLMNPLIDQYLYYLNRTQSNSGTLQQSRLLFSQAGPTSMSLQAKNWLPGPCYRQQRLSKQANDNNNGNFPWTAATKYHLNGRDSLVNPGPAMASHKDDEEKFFPMHGTLIFGKQGTNANDADLEHVMITDEEEIRTTNPVATEQYGNVSNNLQNSNTGPTTENVNHQGALPGMVWQDRDVYLQGPIWAKIPHTDGHFHPSPLMGGFGLKHPPPQIMIKNTPVPANPPTNFSAAKFASFITQYSTGQVSVEIEWELQKENSKRWNPEIQYTSNYNKSVNVDFTVDTNGVYSEPRPIGTRYLTRNL

SEQ ID NO: 1903 - protein, 735 aa, Artificial Sequence
  Synthetic Polypeptide
MAADGYLPDWLEDTLSEGIRQWWKLKPGPPPPKPAERHQDDSRGLVLPGYKYLGPFNGLDKGEPVNEADAAALEHDKAYDRQFDSGDNPYLKYNHADAEFQERLKEDTSFGGNLGRAVFQAKKRVLEPLGLVEEPVKTAPGKKRPVEHSPAEPDSSSGTGKAGQQPARKRLNFGQTGDADSVPDPQPLGQPPAAPTSLGSTTMATGSGAPMADNNEGADGVGNSSGNWHCDSQWLGDRVITTSTRTWALPTYNNHLYKQISSQSGASNDNHYFGYSTPWGYFDFNRFHCHFSPRDWQRLINNNWGFRPKRLNFKLFNIQVKEVTQNDGTTTIANNLTSTVQVFTDSEYQLPYVLGSAHQGCLPPFPADVFMVPQYGYLTLNNGSQAVGRSSFYCLEYFPSQMLRTGNNFTFSYTFEDVPFHSSYAHSQSLDRLMNPLIDQYLYYLNRTQSNSGTLQQSRLLFSQAGPTSMSLQAKNWLPGPCYRQQRLSKQANDNNNSNFPWTAATKYHLNGRDSLVNPGPAMASHKDDEEKFFPMHGTLIFGKQGTNANDADLEHVMITDEEEIRTTNPVATEQYGNVSNNLQNSNTGPTTENVNHQGALPGMVWQDRDVYLQGPIWAKIPHTDGHFHPSPLMGGFGLKHPPPQIMIKNTPVPANPPTNFSAAKFASFITQYSTGQVSVEIEWELQKENSKRWNPEIQYTSNYNKSVNVDFTVDTNGVYSEPRPIGTRYLTRNL

SEQ ID NO: 1904 - protein, 735 aa, Artificial Sequence
  Synthetic Polypeptide
MAADGYLPDWLEDTLSEGIRQWWKLKPGPPPPKPAERHQDDSRGLVLPGYKYLGPFNGLDKGEPVNEADAAALEHDKAYDRQLDSGDNPYLKYNHADAEFQERLKEDTSFGGNLGRAVFQAKKRVLEPLGLVEEPVKTAPGKKRPVEHSPAEPDSSSGTGKAGQQPARKRLNFGQTGDADSVPDPQPLGQPPAAPTSLGSTTMATGSGAPMADNNEGADGVGNSSGNWHCDSQWLGDRVITTSTRTWALPTYNNHLYKQISSQSGASNDNHYFGYSTPWGYFDFNRFHCHFSPRDRQRLINNNWGFRPKRLNFKLFNIQVKEVTQNDGTTTIANNLTSTVQVFTDSEYQLPYVLGSAHQGCLPPFPADVFMVPQYGYLTLNNGSQAVGRSSFYCLEYFPSQMLRTGNNFTFSYTFEDVPFHSSYAHSQSLDRLMNPLIDQYLYYLNRTQSNSGTLQQSRLLFSQAGPTSMSLQAKNWLPGPCYRQQRLSKQANDNNNSNFPWTAATKYHLNGRDSLVNPGPAMASHKDDEEKFFPMHGTLIFGKQGTNANDADLEHVMITDEEEIRTTNPVATEQYGNVSNNLQNSNTGPTTENVNHQGALPGMVWQDRDVYLQGPIWAKIPHTDGHFHPSPLMGGFGLKHPPPQIMIKNTPVPANPPTNFSAAKFASFITQYSTGQVSVEIEWELQKENSKRWNPEIQYTSNYNKSVNVDFTVDTNGVYSEPRPIGTRYLTRNL

SEQ ID NO: 1905 - protein, 735 aa, Artificial Sequence
  Synthetic Polypeptide
MAADGYLPDWLEDTLSEGIRQWWKLKPGPPPPKPAERHQDDSRGLVLPGYKYLGPFNGLDKGEPVNEADAAALEHDKAYDRQLDSGDNPYLKYNHADAEFQERLKEDTSFGGNLGRAVFQAKKRVLEPLGLVEEPVKTAPGKKRPVEHSPAEPDSSSGTGKAGQQPARKRLNFGQTGDADSVPDPQPLGQPPAAPTSLGSTTMATGSGAPMADNNEGADGVGNSSGNWHCDSQWLGDRVITTSTRTWALPAYNNHLYKQISSQSGASNDNHYFGYSTPWGYFDFNRFHCHFSPRDWQRLINNNWGFRPKRLNFKLFNIQVKEVTQNDGTTTIANNLTSTVQVFTDSEYQLPYVLGSAHQGCLPPFPADVFMVPQYGYLTLNNGSQAVGRSSFYCLEYFPSQMLRTGNNFTFSYTFEDVPFHSSYAHSQSLDRLMNPLIDQYLYYLNRTQSNSGTLQQSRLLFSQAGPTSMSLQAKNWLPGPCYRQQRLSKQANDNNNSNFPWTAATKYHLNGRDSLVNPGPAMASHKDDEEKFFPMHGTLIFGKQGTNANDADLEHVMITDEEEIRTTNPVATEQYGNVSNNLQNSNTGPTTENVNHQGALPGMVWQDRDVYLQGPIWAKIPHTDGHFHPSPLMGGFGLKHPPPQIMIKNTPVPANPPTNFSAAKFASFITQYSTGQVSVEIEWELQKENSKRWNPEIQYTSNYNKSVNVDFTVDTNGVYSEPRPIGTRYLTRNL

SEQ ID NO: 1906 - protein, 734 aa, Artificial Sequence
  Synthetic Polypeptide
MAADGYLPDWLEDTLSEGIRQWWKLKPGPPPPKPAERHQDDSRGLVLPGYKYLGPFNGLDKGEPVNEADAAALEHDKAYDRQLDSGDNPYLKYNHADAEFQERLKEDTSFGGNLGRAVFQAKKRVLEPLGLVEEPVKTAPGKKRPVEHSPAEPDSSSGTGKAGQQPARKRLNFGQTGDADSVPDPQPLGQPPAAPTSLGSTTMATGSGAPMADNNEGADGVGNSSGNWHCDSQWLGDRVITTSTRTWALPTYNNHLYKQISSQSGASNDNHYFGYSTPWGYFDFNRFHCHFSPRDWQRLINNNWGFRPKRLNFKLFNIQVKEVTQNDGTTTIANNLTSTVQVFTDSEYQLPYVLGSAHQGCLPPFPADAFMVPQYGYLTLNNGSQAVGRSSFYCLEYFPSQMLRTGNNFTFSYTFEDVPFHSSYAHSQSLDRLMNPLIDQYLYYLNRTQSNSGTLQQSRLLFSQAGPTSMSLQAKNWLPGPCYRQQRLSKQANDNNSNFPWTAATKYHLNGRDSLVNPGPAMASHKDDEEKFFPMHGTLIFGKQGTNANDADLEHVMITDEEEIRTTNPVATEQYGNVSNNLQNSNTGPTTENVNHQGALPGMVWQDRDVYLQGPIWAKIPHTDGHFHPSPLMGGFGLKHPPPQIMIKNTPVPANPPTNFSAAKFASFITQYSTGQVSVEIEWELQKENSKRWNPEIQYTSNYNKSVNVDFTVDTNGVYSEPRPIGTRYLTRNL

SEQ ID NO: 1907 - protein, 735 aa, Artificial Sequence
  Synthetic Polypeptide
MAADGYLPDWLEDTLSEGIRQWWKLKPGPPPPKPAERHQDDSRGLVLPGYKYLGPFNGLDKGEPVNEADAAALEHDKAYDRQLDSGDNPYLKYNHADAEFQERLKEDTSFGGNLGRAVFQAKKRVLEPLGLVEEPVKTAPGKKRPVEHSPAEPDSSSGTGKAGQQPARKRLNFGQTGDADSVPDPQPLGQPPAAPTSLGSTTMATGSGAPMADNNEGADGVGNSSGNWHCDSQWLGDRVITTSTRTWALPTYNNHLYKQISSQSGASNDNHYFGYSTPWGYFDFNRFHCHFSPRGWQRLINNNWGFRPKRLNFKLFNIQVKEVTQNDGTTTIANNLTSTVQVFTDSEYQLPYVLGSAHQGCLPPFPADVFMVPQYGYLTLNNGSQAVGRSSFYCLEYFPSQMLRTGNNFTFSYTFEDVPFHSSYAHSQSLDRLMNPLIDQYLYYLNRTQSNSGTLQQSRLLFSQAGPTSMSLQAKNWLPGPCYRQQRLSKQANDNNNSNFPWTAATKYHLNGRDSLVNPGPAMASHKDDEEKFFPMHGTLIFGKQGTNANDADLEHVMITDEEEIRTTNPVATEQYGNVSNNLQNSNTGPTTENVNHQGALPGMVWQDRDVYLQGPIWAKIPHTDGHFHPSPLMGGFGLKHPPPQIMIKNTPVPANPPTNFSAAKFASFITQYSTGQVSVEIEWELQKENSKRWNPEIQYTSNYNKSVNVDFTVDTNGVYSEPRPIGTRYLTRNL

SEQ ID NO: 1908 - protein, 735 aa, Artificial Sequence
  Synthetic Polypeptide
MAADGYLPDWLEDTLSEGIRQWWKLKPGPPPPKPAERHQDDSRGLVLPGYKYLGPFNGLDKGEPVNEADAAALEHDKAYDRQLDSGDNPYLKYNHADAEFQERLKEDTSFGGNLGRAVFQAKKRVLEPLGLVEEPVKTAPGKKRPVEHSPAEPDSSSGTGKAGQQPARKRLNFGQTGDADSVPDPQPLGQPPAAPTSLGSTTMATGSGAPMADNNEGADGVGNSSGNWHCDSQWLGDRVITTSTRTWALPTYNNHLYKQISSQSGASNDNHYFGYSTPWGYFDFNRFHCHFSPRDWQRLINNNWGFRPKRLNFKLFNIQVKEVTQNDGTTTIANNLTSTVQVFTDSEYQLPYVLGSAHQGCLPPFPADVFMVPQYGYLTLNNGSQAVGRSSFYCLEYFPSQMLRTGNNFTFSYTFEDVPFHSSYAHSQSLDRLMNPLIDQYLYYLNGTQSNSGTLQQSRLLFSQAGPTSMSLQAKNWLPGPCYRQQRLSKQANDNNNSNFPWTAATKYHLNGRDSLVNPGPAMASHKDDEEKFFPMHGTLIFGKQGTNANDADLEHVMITDEEEIRTTNPVATEQYGNVSNNLQNSNTGPTTENVNHQGALPGMVWQDRDVYLQGPIWAKIPHTDGHFHPSPLMGGFGLKHPPPQIMIKNTPVPANPPTNFSAAKFASFITQYSTGQVSVEIEWELQKENSKRWNPEIQYTSNYNKSVNVDFTVDTNGVYSEPRPIGTRYLTRNL

SEQ ID NO: 1909 - protein, 735 aa, Artificial Sequence
  Synthetic Polypeptide
MAADGYLPDWLEDTLSEGIRQWWKLKPGPPPPKPAERHQDDSRGLVLPGYKYLGPFNGLDKGEPVNEADAAALEHDKAYDRQLDSGDNPYLKYNHADAEFQERLKEDTSFGGNLGRAVFQAKKRVLEPLGLVEEPVKTAPGKKRPVEHSPAEPDSSSGTGKAGQQPARKRLNFGQTGDADSVPDPQPLGQPPAAPTSLGSTTMATGSGAPMADNNEGADGVGNSSGNWHCDSQWLGDRVITTSTRTWALPTYNNHLYKQISSQSGASNDNHYFGYSTPWGYFDFNRFHCHLSPRDWQRLINNNWGFRPKRLNFKLFNIQVKEVTQNDGTTTIANNLTSTVQVFTDSEYQLPYVLGSAHQGCLPPFPADVFMVPQYGYLTLNNGSQAVGRSSFYCLEYFPSQMLRTGNNFTFSYTFEDVPFHSSYAHSQSLDRLMNPLIDQYLYYLNRTQSNSGTLQQSRLLFSQAGPTSMSLQAKNWLPGPCYRQQRLSKQANDNNNSNFPWTAATKYHLNGRDSLVNPGPAMASHKDDEEKFFPMHGTLIFGKQGTNANDADLEHVMITDEEEIRTTNPVATEQYGNVSNNLQNSNTGPTTENVNHQGALPGMVWQDRDVYLQGPIWAKIPHTDGHFHPSPLMGGFGLKHPPPQIMIKNTPVPANPPTNFSAAKFASFITQYSTGQVSVEIEWELQKENSKRWNPEIQYTSNYNKSVNVDFTVDTNGVYSEPRPIGTRYLTRNL

SEQ ID NO: 1910 - protein, 735 aa, Artificial Sequence
  Synthetic Polypeptide
MAADGYLPDWLEDTLSEGIRQWWKLKPGPPPPKPAERHQDDSRGLVLPGYKYLGPFNGLDKGEPVNEADAAALGHDKAYDRQLDSGDNPYLKYNHADAEFQERLKEDTSFGGNLGRAVFQAKKRVLEPLGLVEEPVKTAPGKKRPVEHSPAEPDSSSGTGKAGQQPARKRLNFGQTGDADSVPDPQPLGQPPAAPTSLGSTTMATGSGAPMADNNEGADGVGNSSGNWHCDSQWLGDRVITTSTRTWALPTYNNHLYKQISSQSGASNDDHYFGYSTPWGYFDFNRFHCHFSPRDWQRLINNNWGFRPKRLNFKLFNIQVKEVTQNDGTTTIANNLTSTVQVFTDSEYQLPYVLGSAHQGCLPPFPADVFMVPQYGYLTLNNGSQAVGRSSFYCLEYFPSQMLRTGNNFTFSYTFEDVPFHSSYAHSQSLDRLMNPLIDQYLYYLNRTQSNSGTLQQSRLLFSQAGPTSMSLQAKNWLPGPCYRQQRLSKQANDNNNSNFPWTAATKYHLNGRDSLVNPGPAMASHKDDEEKFFPMHGTLIFGKQGTNANDADLEHVMITDEEEIRTTNPVATEQYGNVSNNLQNSNTGPTTENVNHQGALPGMVWQDRDVYLQGPIWAKIPHTDGHFHPSPLMGGFGLKHPPPQIMIKNTPVPANPPTNFSAAKFASFITQYSTGQVSVEIEWELQKENSKRWNPEIQYTSNYNKSVNVDFTVDTNGVYSEPRPIGTRYLTRNL

SEQ ID NO: 1911 - protein, 735 aa, Artificial Sequence
  Synthetic Polypeptide
MAADGYLPDWLEDTLSEGIRQWWKLKPGPPPPKPAERHQDDSRGLVLPGYKYLGPFNGLDKGEPVNEADAAALEHDKAYDRQLDSGDNPYLKYNHADAEFQERLKEDTSFGGNLGRAVFQAKKRVLEPLGLVEEPVKTAPGKKRPVEHSPAEPDSSSGTGKAGQQPARKRLNFGQTGDADSVPDPQPLGQPPAAPTSLGSTTMATGSGAPMADNNEGADGVGNSSGNWHCDSQWLGDRVITTSTRTWALPTYNNHLYKQISSQSGASNDNHYFGYSTPWGYFDFNRFHCHFSPRDWQRLINNNWGFRPKRLNFKLFNIQVKEVTQNDGTTTIANNLTSTVQVFTDSEYQLPYVLGSAHQGCLPPFPADVFMVPQYGYLTLNNGSQAVGRSSFYCLEYFPSQMLRTGNNFTFSYTFEDVPFHSSYAHSQSLDRLMNPLIDQYLYYLNRTQSNSGTLQQSRLLFSQAGPTSMSLQAKNWLPGPCYRQQRLSKQANDNNNSNFPWTAATKYHLNGRDSLVNPGPAMASHKDDEEKFFPMHGTLIFGKQGTNANDADLEHVMITDEEEIRTTNPVATEQYGNVSNNLQNSNTGPTTENVNHQGALPGMVWQDRDVYLQGPIWAKIPHTDGHFRPSPLMGGFGLKHPPPQIMIKNTPVPANPPTNFSAAKFASFITQYSTGQVSVEIEWELQKENSKRWNPEIQYTSNYNKSVNVDFTVDTNGVYSEPRPIGTRYLTRNL

SEQ ID NO: 1912 - protein, 735 aa, Artificial Sequence
  Synthetic Polypeptide
MAADGYLPDWLEDTLSEGIRQWWKLKPGPPPPKPAERHQDDSRGLVLPGYKYLGPFNGLDKGEPVNEADAAALEHDKAYDRQLDSGDNPYLKYNHADAEFQERLKEDTSFGGNLGRAVFQAKKRVLEPLGLVEEPVKTAPGKKRPVEHSPAEPDSSSGTGKAGQQPARKRLNFGQTGDADSVPDPQPLGQPPAAPTSLGSTTMATGSGAPMADNNEGADGVGNSSGNWHCDSQWLGDRVITTSTRTWALPTYNNHLYKQISSQSGASNDNHYFGYSTPWGYFDFNRFHCHFSPRDWQRLINNNWGFRPKRLNFKLFNIQVKEVTQNDGTTTIANNLTSTVQVFTDSEYQLPYVLGSAHQGCLPPFPADVFMVPQYGYLTLNNGSQAVGRSSFYCLEYFPSQMLRTGNNFTFSYTFEDVPFHSSYAHSQSLDRLMNPLIDQYLYYLNRTQSNSGTLQQSRLLFSQAGPTSMSLQAKNWLPGPCYRQQRLSKQANDNNNSNFPWTAATKYHLNGRDSLVNPGPAMASHKDDEEKFFPMHGTLIFGKQGTNANDADLEHVMITDEEEIRTTNPVATEQYGNVSNNLQNSNTGPTTENVNHQGALPGMVWQDRDVYLQGPIWAKIPHTDGHFHPSPLMGGFGLKHPPPQIMIKNTPVPANPPTNFSAAKSASFITQYSTGQVSVEIEWELQKENSKRWNPEIQYTSNYNKSVNVDFTVDTNGVYSEPRPIGTRYLTRNL

SEQ ID NO: 1913 - protein, 735 aa, Artificial Sequence
  Synthetic Polypeptide
MAADGYLPDWLEDTLSEGIRQWWKLKPGPPPPKPAERHQDDSRGLVLPGYKYLGPFNGLDKGEPVNEADAAALEHDKAYDRQLDSGDNPYLKYNHADAEFQERLKEDTSFGGNLGRAVFQAKKRVLEPLGLVEEPVKTAPGKKRPVEHSPAEPDSSSGTGKAGQQPARKRLNFGQTGDADSVPDPQPLGQPPAAPTSLGSTTMATGSGAPMADNNEGADGVGNSSGNWHCDSQWLGDRVITTSTRTWALPTYNNHLYKQISSQSGASNDNHYFGYSTPWGYFDFNRFHCHFSPRDWQRLINNNWGFRPKRLNFKLFNIQVKGVTQNDGTTTIANNLTSTVQVFTDSEYQLPYVLGSAHQGCLPPFPADVFMVPQYGYLTLNNGSQAVGRSSFYCLEYFPSQMLRTGNNFTFSYTFEDVPFHSSYAHSQSLDRLMNPLIDQYLYYLNRTQSNSGTLQQSRLLFSQAGPTSMSLQAKNWLPGPCYRQQRLSKQANDNNNSNFPWTAATKYHLNGRDSLVNPGPAMASHKDDEEKFFPMHGTLIFGKQGTNANDADLEHVMITDEEEIRTTNPVATEQYGNVSNNLQNSNTGPTTENVNHQGALPGMVWQDRDVYLQGPIWAKIPHTDGHFHPSPLMGGFGLKHPPPQIMIKNTPVPANPPTNFSAAKFASFITQYSTGQVSVEIEWELQKENSKRWNPEIQYTSNYNKSVNVDFTVDTNGVYSEPRPIGTRYLTRNL

SEQ ID NO: 1914 - protein, 735 aa, Artificial Sequence
  Synthetic Polypeptide
MAADGYLPDWLEDTLSEGIRQWWKLKPGPPPPKPAERHQDDSRGLVLPGYKYLGPFNGLDKGEPVNEADAAALEHDKAYDRQLDSGDNPYLKYNHADAEFQERLKEDTSFGGNLGRAVFQAKKRVLEPLGLVEEPVKTAPGKKRPVEHSPAEPDSSSGTGKAGQQPARKRLNFGQTGDADSVPDPQPLGQPPAAPTSLGSTTMATGSGAPMADNNEGADGVGNSSGNWHCDSQWLGDRVITTSTRTWALPTYNNHLYKQISSQSGASNDNHYFGYSTPWGYFDFNRFHCHFSPRDWQRLINNNWGFRPKRLNFKLFNIQVKEVTQNDGTTTIANNLTSTVQVFTDSEYQLPYVLGSAHQGCLPPFPADVFMVPQYGYLTLNNGSQAVGRSSFYCLEYFPSQMLRTGNNFTFSYTFEDVPFHSSYAHSQSLDRLMNPLIDQYLYYLNRTQSNSGTLQQSRLLFSQAGPTSMSLQAKNWLPGPCYRQQRLSKQANDNNNSNFPWTAATKYHLNGRDSLVNPGPAMASHKDDEEKFFPMHGTPIFGKQGTNANDADLEHVMITDEEEIRTTNPVATEQYGNVSNNLQNSNTGPTTENVNHQGALPGMVWQDRDVYLQGPIWAKIPHTDGHFHPSPLMGGFGLKHPPPQIMIKNTPVPANPPTNFSAAKFASFITQYSTGQVSVEIEWELQKENSKRWNPEIQYTSNYNKSVNVDFTVDTNGVYSEPRPIGTRYLTRNL

SEQ ID NO: 1915 - protein, 735 aa, Artificial Sequence
  Synthetic Polypeptide
MAADGYLPDWLEDTLSEGIRQWWKLKPGPPPPKPAERHQDDSRGLVLPGYKYLGPFNGLDKGEPVNEADAAALEHDKAYDRQLDSGDNPYLKYNHADAEFQERLKEDTSFGGNLGRAVFQAKKGVLEPLGLVEEPVKTAPGKKRPVEHSPAEPDSSSGTGKAGQQPARKRLNFGQTGDADSVPDPQPLGQPPAAPTSLGSTTMATGSGAPMADNNEGADGVGNSSGNWHCDSQWLGDRVITTSTRTWALPTYNNHLYKQISSQSGASNDNHYFGYSTPWGYFDFNRFHCHFSPRDWQRLINNNWGFRPKRLNFKLFNIQVKEVTQNDGTTTIANNLTSTVQVFTDSEYQLPYVLGSAHQGCLPPFPADVFMVPQYGYLTLNNGSQAVGRSSFYCLEYFPSQMLRTGNNFTFSYTFEDVPFHSSYAHSQSLDRLMNPLIDQYLYYLNRTQSNSGTLQQSRLLFSQAGPTSMSLQAKNWLPGPCYRQQRLSKQANDNNNSNFPWTAATKYHLNGRDSLVNPGPAMASHKDDEEKFFPMHGTLIFGKQGTNANDADLEHVMITDEEEIRTTNPVATEQYGNVSNNLQNSNTGPTTENVNHQGALPGMVWQDRDVYLQGPIWAKIPHTDGHFHPSPLMGGFGLKHPPPQIMIKNTPVPANPPTNFSAAKFASFITQYSTGQVSVEIEWELQKENSKRWNPEIQYTSNYNKSVNVDFTVDTNGVYSEPRPIGTRYLTRNL

SEQ ID NO: 1916 - protein, 735 aa, Artificial Sequence
  Synthetic Polypeptide
MAADGYLPDWLEDTLSEGIRQWWKLKPGPPPPKPAERHQDDSRGLVLPGYKYLGPFNGLDKGEPVNEADAAALEHDKAYDRQLDSGDNPYLKYNHADAEFQERLKEDTSFGGNLGRAVFQAKKRVLEPLGLVEEPVKTAPGKKRPVEHSPAEPDSSSGTGKAGQQPARKRLNFGQTGDADSVPDPQPLGQPPAAPTSLGSTTMATGSGAPMADNNEGADGVGNSSGNWHCDSQWLGDRVITTSTRTWALPTYNNHLYKQISSQSGASNDNHYFGYSTPWGYFDFNRFHCHFSPRDWQRLINNNWGFRPKRLNFKLFNIQVKEVTQNDGTTTIANNLTSTVQVFTDSEYQLPYVLGSAHQGCLPPFPADVFMVPQYGYLTLNNGSQAVGRSSFYCLEYFPSQMLRTGNNFTFSYTFEDVPFHSSYAHSQSLDRLMNPLIGQYLYYLNRTQSNSGTLQQSRLLFSQAGPTSMSLQAKNWLPGPCYRQQRLPKQANDNNNSNFPWTAATKYHLNGRDSLVNPGPAMASHKDDEEKFFPMHGTLIFGKQGTNANDADLEHVMITDEEEIRTTNPVATEQYGNVSNNLQNSNTGPTTENVNHQGALPGMVWQDRDVYLQGPIWAKIPHTDGHFHPSPLMGGFGLKHPPPQIMIKNTPVPANPPTNFSAAKFASFITQYSTGQVSVEIEWELQKENSKRWNPEIQYTSNYNKSVNVDFTVDTNGVYSEPRPIGTRYLTRNL

SEQ ID NO: 1917 - protein, 735 aa, Artificial Sequence
  Synthetic Polypeptide
MAADGYLPDWLEDTLSEGIRQWWKLKPGPPPPKPAERHQDDSRGLVLPGYKYLGPFNGLDKGEPVNEADAAALEHDKAYDRQLDSGDNPYLKYNHADAEFQERLKEDTSFGGNLGRAVFQAKKRVLEPLGLVEEPVKTAPGKKRPVEHSPAEPDSSSGTGKAGQQPARKRLNFGQTGDADSVPDPQPLGQPPAAPTSLGSTTMATGSGAPMADNNEGADGVGNSSGNWHCDSQWLGDRVITTSTRTWALPTYNNHLYKQISSQSGASNDNHYFGYSTPWGYFDFNRFHCHFSPRDWQRLINNNWGFRPKRLNFKLFNIQVKEVTQNDGTTTIANNLTSTVQVFTDSEYQLPYVLGSAHQGCLPPFPADVFMVPQYGYLTLNNGSQAVGRSSFYCLEYFPSQMLRTGNNFTFSYTFEDVPFHSSYAHSQSLDRLMNPLIDQYLYYLNRTQSNSGTLQQSRLLFSQAGPTSMSLQAKNWLPGPCYRQQRLSKQANDNNNSNFPWTAATKYHLNGRDSLVNPGPAMASHKDDEEKFFPMHGTLIFGKQGTNANDADLEHVMITDEEEIRTTNPVATEQYGNVSNNLQNSNTGPTTENVNHQGALPGMVWQDRDVYLQGPIWAKIPHTDGRFHPSPLMGGFGLKHPPPQIMIKNTPVPANPPTNFSAAKFASFITQYSTGQVSVEIEWELQKENSKRWNPEIQYTSNYNKSVNVDFTVDTNGVYSEPRPIGTRYLTRNL

SEQ ID NO: 1918 - protein, 735 aa, Artificial Sequence
  Synthetic Polypeptide
MAADGYLPDWLEDTLSEGIRQWWKLKPGPPPPKPAERHQDDSRGLVLPGYKYLGPFNGLDKGEPVNEADAAALEHDKAYDRQLDSGDNPYLKYNHADAEFQERLKEDTSFGGNLGRAVFQAKKRVLEPLGLVEEPVKTAPGKKRPVEHSPAEPDSSSGTGKAGQQPARKRLNFGQTGDADSVPDPQPLGQPPAAPTSLGSTTMATGSGAPMADNNEGADGVGNSSGNWHCDSQWLGDRVITTSTRTWALPTYNNHLYKQISSQSGASNDNHYFGYSTPWGYFDFNRFHCHFSPRDWQRLINNNWGFRPKRLNFKLFNIQVKEVTQNDGTTTIANNLTSTVQVFTDSEYQLPYVLGSAHQGCLPPFPADVFMVPQYGYLTLNNGSQAVGRSSFYCLEYFPSQMLRTGNNFTFSYTFEDVPFHSSYAHSQSLDRLMNPLIDQYLYYLNRTQSNSGTLQQSRLLFSQAGPTSMSLQAKNWLPGPCYRQQRLSKQANDNNNSNFPWTAATKYHLNGRDSLVNPGPAMASHKDDEEKFFPMHGALIFGKQGTNANDADLEHVMITDEEEIRTTNPVATEQYGNVSNNLQNSNTGPTTENVNHQGALPGMVWQDRDVYLQGPIWAKIPHTDGHFHPSPLMGGFGLKHPPPQIMIKNTPVPANPPTNFSAAKFASFITQYSTGQVSVEIEWELQKENSKRWNPEIQYTSNYNKSVNVDFTVDTNGVYSEPRPIGTRYLTRNL

SEQ ID NO: 1919 - protein, 735 aa, Artificial Sequence
  Synthetic Polypeptide
MAADGYLPDWLEDTLSEGIRQWWKLKPGPPPPKPAERHQDDSRGLVLPGYKYLGPFNGLDKGEPVNEADAAALEHDKAYDRQLDSGDNPYLKYNHADAEFQERLKEDTSFGGNLGRAVFQAKKRVLEPLGLVEEPVKTAPGKKRPVEHSPAEPDSSSGTGKAGQQPARKRLNFGQTGDADSVPDPQPLGQPPAAPTSLGSTTMATGSGAPMADNNEGADGVGNSSGNWHCDSQWLGDRVITTSTRTWALPTYNNHLYKQISSQSGASNDNHYFGYSTPWGYFDFNRFHCHFSPRDWQRLINNNWGFRPKRLNFKLFNIQVKEVTQNDGTTTIANNLTSTVQVFTDSEYQLPYVLGSAHQGCLPPFPADVFMVPQYGYLTLNNGSQAVGRSSFYCLEYFPSQMLRTGNNFTFSYTFEDVPFHSSYAHSQSLDRLMNPLIDQYLYYLNRTQSNSGTLQQSRLLFSQAGPTSMSLQAKNWLPGPCYRQQRLSKQANDNNNSNFPWTAATKYHLNGRDSLVNPGPAMASHKDDEEKFFPMHGTLIFGKQGTNANDADLEHAMITDEEEIRTTNPVATEQYGNVSNNLQNSNTGPTTENVNHQGALPGMVWQDRDVYLQGPIWAKIPHTDGHFHPSPLMGGFGLKHPPPQIMIKNTPVPANPPTNFSAAKFASFITQYSTGQVSVEIEWELQKENSKRWNPEIQYTSNYNKSVNVDFTVDTNGVYSEPRPIGTRYLTRNL

SEQ ID NO: 1920 - protein, 735 aa, Artificial Sequence
  Synthetic Polypeptide
MAADGYLPDWLEDTLSEGIRQWWKLKPGPPPPKPAERHQDDSRGLVLPGYKYLGPFNGLDKGEPVNEADAAALEHDKAYDRQLDSGDNPYLKYNHADAEFQERLKEDTSFGGNLGRAVFQAKKRVLEPLGLVEEPVKTAPGKKRPVEHSPAEPDSSSGTGKAGQQPARKRLNFGQTGDADSVPDPQPLGQPPAAPTSLGSTTMATGSGAPMADNNEGADGVGNSSGNWHCDSQWLGDRVITTSTRTWALPTYNNHLYKQISSQSGASNDNHYFGYSTPWGYFDFNRFHCHFSPRDWQRLINNNWGFRPKRLNFKLFNIQVKEVTQNDGTTTIANNLTSTVQVFTDSEYQLPYVLGSAHQGCLPPFPADVFMVPQYGYLTLNNGSQAVGRSSFYCLEYFPSQMLRTGNNFTFSYTFEDVPFHSSYAHSQSLDRLMNPLIDQYLYYLNRTQSNSGTLQQSRLLFSQAGPTSMSLQAKNWLPGPCYRQQRLSKQANDNNNSNFPWTAATKYHLNGRDSLVNPGPAMASHKDDEEKFFPMHGTLIFGKQGTNANDADLEHVMITDEEEIRTTNPVATEQYGNVSNNLQNSNTGPTTENVNHQGALPGMVWQDRDVYLQGPIWAKIPHTDGHFHPSPLMGGFGLKHPPPQIMIKNTPVPANPPTNFSAAKFASFITQYSTGQVSVEIEWELQKENSKRWNPEIRYTSNYNKSVNVDFTVDTNGVYSEPRPIGTRYLTRNL

SEQ ID NO: 1921 - protein, 735 aa, Artificial Sequence
  Synthetic Polypeptide
MAADGYLPDWLEDTLSEGIRQWWKLKPGPPPPKPAERHQDDSRGLVLPGYKYLGPFNGLDKGEPVNEADAAALEHDKAYDRQLDSGDNPYLKYNHADAEFQERLKEDTSFGGNLGRAVFQAKKRVLEPLGLVEEPVKTAPGKKRPVEHSPAEPDSSSGTGKAGQQPARKRLNFGQTGDADSVPDPQPLGQPPAAPTSLGSTTMATGSGAPMADNNEGADGVGNSSGNWHCDSQWLGDRVITTSTRTWALPTYNNHLYKQISSQSGASNDNHYFGYSTPWGYFDFNRFHCHFSPRDWQRLINNNWGFRPKRLNFKLFNIQVKEVTQNDGTTTIANNLTSTVQVFTDSEYQLPYVLGSAHQGCLPPFPADVFMVPQYGYLTLNNGSQAVGRSSFYCLEYFPSQMLRTGNNFTFSYTFEDVPFHSSYAHSQSLDRLMNPLIDQYLYYLNRTQSNSGTLQQSRLLFSQAGPTSMSLQAKNWLPGPCYRQQRLSKQANDNNNSNFPRTAATKYHLNGRDSLVNPGPAMASHKDDEEKFFPMHGTLIFGKQGTNANDADLEHVMITDEEEIRTTNPVATEQYGNVSNNLQNSNTGPTTENVNHQGALPGMVWQDRDVYLQGPIWAKIPHTDGHFHPSPLMGGFGLKHPPPQIMIKNTPVPANPPTNFSAAKFASFITQYSTGQVSVEIEWELQKENSKRWNPEIQYTSNYNKSVNVDFTVDTNGVYSEPRPIGTRYLTRNL

SEQ ID NO: 1922 - protein, 735 aa, Artificial Sequence
  Synthetic Polypeptide
MAADGYLPDWLEDTLSEGIRQWWKLKPGPPPPKPAERHQDDSRGLVLPGYKYLGPFNGLDKGEPVNEADAAALEHDKAYDRQLDSGDNPYLKYNHADAEFQERLKEDTSFGGNLGRAVFQAKKRVLEPLGLVEEPVKTAPGKKRPVEHSPAEPDSSSGTGKAGQQPARKRLNFGQTGDADSVPDPQPLGQPPAAPTSLGSTTMATGSGAPMADNNEGADGVGNSSGNWHCDSQWLGDRVITTSTRTWALPTYNNHLYKQISSQSGASNDNHYFGYSTPWGYFDFNRFHCHFSPRDWQRLINNNWGFRPKRLNFKLFNIQVKEVTQNDGTTTIANNLTSTVQVFTDSEYQLPYVLGSAHQGCLPPFPADVFMVPQYGYLTLNNGSQAVGRSSFYCLEYFPSQMLRTGNNFTFSYTFEDVPFHSSYAHSQSLDRLMNPLIGQYLYYLNRTQSNSGTLQQSRLLFSQAGPTSMSLQAKNWLPGPCYRQQRLSKQANDNNNSNFPWTAATKYHLNGRDSLVNPGPAMASHKDDEEKFFPMHGTLIFGKQGTNANDADLEHVMITDEEEIRTTNPVATEQYGNVSNNLQNSNTGPTTENVNHQGALPGMVWQDRDVYLQGPIWAKIPHTDGHFHPSPLMGGFGLKHPPPQIMIKNTPVPANPPTNFSAAKFASFITQYSTGQVSVEIEWELQKENSKRWNPEIQYTSNYNKSVNVDFTVDTNGVYSEPRPIGTRYLTRNL

SEQ ID NO: 1923 - protein, 735 aa, Artificial Sequence
  Synthetic Polypeptide
MAADGYLPDWLEDTLSEGIRQWWKLKPGPPPPKPAERHQDDSRGLVLPGYKYLGPFNGLDKGEPVNEADAAALEHDKAYDRQLDSGDNPYLKYNHADAEFQERLKEDTSFGGNLGRAVFQAKKRVLEPLGLVEEPVKTAPGKKRPVEHSPAEPDSSSGTGKAGQQPARKRLNFGQTGDADSVPDPQPLGQPPAAPTSLGSTTMATGSGAPMADNNEGADGVGNSSGNWHCDSQWLGDRVITTSTRTWALPTYNNHLYKQISSQSGASNDNHYFGYSTPWGYFDFNRFHCHFSPRDWQRLINNNWGFRPKRLNFKLFNIQVKEVTQNDGTTTIANNLTSTVQVFTDSEYQLPYVLGSAHQGCLPPFPADVFMVPQYGYLTLNNGSQAVGRSSFYCLEYFPSQMLRTGNNFTFSYTFEDVPFHSSYAHSQSLDRLMNPLIDQYLYYLNRTQSNSGTLQQSRLLFSQAGPTSMSLQAKNWLPGPCYRQQRLSKQANDNNNSNFPWTAATKYHLNGRDSLVNPGPAMASHKDDEEKFFPMHGTLIFGKQGTNANDADLEHVMITDEEEIRTTNPVATEQYGNVSNNLQNSNTGPTTENVNHQGALPGMVWQDRDVYLQGPIWAKIPHTDGHFHPSPLMGGFGLKHPPPQIMIKNTPVPANPPTNFSAAKFASFITQYSTGQVGVEIEWELQKENSKRWNPEIQYTSNYNKSVNVDFTVDTNGVYSEPRPIGTRYLTRNL

SEQ ID NO: 1924 - protein, 735 aa, Artificial Sequence
  Synthetic Polypeptide
MAADGYLPDWLEDTLSEGIRQWWKLKPGPPPPKPAERHQDDSRGLVLPGYKYLGPFNGLDKGEPVNEADAAALEHDKAYDRQLDSGDNPYLKYNHADAEFQERLKEDTSFGGNLGRAVFQAKKRVLEPLGLVEEPVKTAPGKKRPVEHSPAEPDSSSGTGKAGQQPARKRLNFGQTGDADSVPDPQPLGQPPAAPTSLGSTTMATGSGAPMADNNEGADGVGNSSGNWHCDSQWLGDRAITTSTRTWALPTYNNHLYKQISSQSGASNDNHYFGYSTPWGYFDFNRFHCHFSPRDWQRLINNNWGFRPKRLNFKLFNIQVKEVTQNDGTTTIANNLTSTVQVFTDSEYQLPYVLGSAHQGCLPPFPADVFMVPQYGYLTLNNGSQAVGRSSFYCLEYFPSQMLRTGNNFTFSYTFEDVPFHSSYAHSQSLDRLMNPLIDQYLYYLNRTQSNSGTLQQSRLLFSQAGPTSMSLQAKNWLPGPCYRQQRLSKQANDNNNSNFPWTAATKYHLNGRDSLVNPGPAMASHKDDEEKFFPMHGTLIFGKQGTNANDADLEHVMITDEEEIRTTNPVATEQYGNVSNNLQNSNTGPTTENVNHQGALPGMVWQDRDVYLQGPIWAKIPHTDGHFHPSPLMGGFGLKHPPPQIMIKNTPVPANPPTNFSAAKFASFITQYSTGQVSVEIEWELQKENSKRWNPEIQYTSNYNKSVNVDFTVDTNGVYSEPRPIGTRYLTRNL

SEQ ID NO: 1925 - protein, 735 aa, Artificial Sequence
  Synthetic Polypeptide
MAADGYLPDWLEDTLSEGIRQWWKLKPGPPPPKPAERHQDDSRGLVLPGYKYLGPFNGLDKGEPVNEADAAALEHDKAYDRQLDSGDNPYLKYNHADAEFQERLKEDTSFGGNLGRAVFQAKKRVLEPLGLVEEPVKTAPGKKRPVEHSPAEPDSSSGTGKAGQQPARKRLNFGQTGDAGSVPDPQPLGQPPAAPTSLGSTTMATGSGAPMADNNEGADGVGNSSGNWHCDSQWLGDRVITTSTRTWALPTYNNHLYKQISSQSGASNDNHYFGYSTPWGYFDFNRFHCHFSPRDWQRLINNNWGFRPKRLNFKLFNIQVKEVTQNDGTTTIANNLTSTVQVFTDSEYQLPYVLGSAHQGCLPPFPADVFMVPQYGYLTLNNGSQAVGRSSFYCLEYFPSQMLRTGNNFTFSYTFEDVPFHSSYAHSQSLDRLMNPLIDQYLYYLNRTQSNSGTLQQSRLLFSQAGPTSMSLQAKNWLPGPCYRQQRLSKQANDNNNSNFPWTAATKYHLNGRDSLVNPGPAMASHKDDEEKFFPMHGTLIFGKQGTNANDADLEHVMITDEEEIRTTNPVATEQYGNVSNNLQNSNTGPTTENVNHQGALPGMVWQDRDVYLQGPIWAKIPHTDGHFHPSPLMGGFGLKHPPPQIMIKNTPVPANPPTNFSAAKFASFITQYSTGQVSVEIEWELQKENSKRWNPEIQYTSNYNKSVNVDFTVDTNGVYSEPRPIGTRYLTRNL

SEQ ID NO: 1926 - protein, 735 aa, Artificial Sequence
  Synthetic Polypeptide
MAADGYLPDWLEDTLSEGIRQWWKLKPGPPPPKPAERHQDDSRGLVLPGYKYLGPFNGLDKGEPVNEADAAALEHDKAYDRQLDSGDSPYLKYNHADAEFQERLKEDTSFGGNLGRAVFQAKKRVLEPLGLVEEPVKTAPGKKRPVEHSPAEPDSSSGTGKAGQQPARKRLNFGQTGDADSVPDPQPLGQPPAAPTSLGSTTMATGSGAPMADNNEGADGVGNSSGNWHCDSQWLGDRVITTSTRTWALPTYNNHLYKQISSQSGASNDNHYFGYSTPWGYFDFNRFHCHFSPRDWQRLINNNWGFRPKRLNFKLFNIQVKEVTQNDGTTTIANNLTSTVQVFTDSEYQLPYVLGSAHQGCLPPFPADVFMVPQYGYLTLNNGSQAVGRSSFYCLEYFPSQMLRTGNNFTFSYTFEDVPFHSSYAHSQSLDRLMNPLIDQYLYYLNRTQSNSGTLQQSRLLFSQAGPTSMSLQAKNWLPGPCYRQQRLSKQANDNNNSNFPWTAATKYHLNGRDSLVNPGPAMASHKDDEEKFFPMHGTLIFGKQGTNANDADLEHVMITDEEEIRTTNPVATEQYGNVSNNLQNSNTGPTTENVNHQGALPGMVWQDRDVYLQGPIWAKIPHTDGHFHPSPLMGGFGLKHPPPQIMIKNTPVPANPPTNFSAAKFASFITQYSTGQVSVEIEWELQKENSKRWNPEIQYTSNYNKSVNVDFTVDTNGVYSEPRPIGTRYLTRNL

SEQ ID NO: 1927 - protein, 735 aa, Artificial Sequence
  Synthetic Polypeptide
MAADGYLPDWLEDTLSEGIRQWWKLKPGPPPPKPAERHQDDSRGLVLPGYKYLGPFNGLDKGEPVNEADAAALEHDKAYDRQLDSGDNPYLKYNHADAEFQERLKEDTSFGGNLGRAVFQAKKRVLEPLGLVEEPVKTAPGKKRPVEHSPAEPDSSSGTGKAGQQPARKRLNFGQTGDADSVPDPQPLGQPPAAPTSLGSTTMATGSGAPMADNNEGADGVGNSSGNWHCDSQWLGDRVITTSTRTWALPTYNNHLYKQISSQSGASNDNHYFGYSTPWGYFDFNRFHCHFSPRDWQRLINNNWGFRPKRLNFKLFNIQVKEVTQNDGTTTIANNLTSTVQVFTDSEYQLPYVLGSAHQGCLPPFPADVFMVPQYGYLTLNNGSQAVGRSSFYCLEYFPSQMLRTGNNFTFSYTFEDVPFHSSYAHSQSLDRLMNPLIDQYLYYLNRTQSNSGTLQQSRLLFSQAGPTSMSLQAKNWLPGPCYRQQRLSKQANDNNNSNFPWTAATKYHLNGRDSLVNPGPAMASHKDDEEKFFPMHGTLIFGKQGTNANDADLEHVMITDEEEIRTTNPVATEQYGNVSNNLQNSNTGPTTENVNHQGALPGMVWQDRDVYLQGPIWAKIPHTDGHFHPSPLMGGFGLKHPPPQIMIKNTPVPANPPTNFSAAKFASFITQYSTGQVSVEIEWELQKENSKRWNPEIQYTSNYNKSVNVDFTVDTNGVYSEPRPIGTRYLTRNP

SEQ ID NO: 1928 - protein, 735 aa, Artificial Sequence
  Synthetic Polypeptide
MAADGYLPDWLEDTLSEGIRQWWKLKPGPPPPKPAERHQDDSRGLVLPGYKYLGPFNGLDKGEPVNEADAAALEHDKAYDRQLDSGDNPYLKYNHADAEFQERLKEDTSFGGNLGRAVFQAKKRVLEPLGLVEEPVKTAPGKKRPVEHSPAEPDSSSGTGKAGQQPARKRLNFGQTGDADSVPDPQPLGQPPAAPTSLGSTTMATGSGAPMADNNEGADGVGNSSGNWHCDSQWLGDRVITTSTRTWALPTYNNHLYKQISSQSGASNDNHYFGYSTPWGYFDFNRFHCHFSPRDWQRLINNNWGFRPKRLNFKLFNIQVKEVTQNDGTTTIANNLTSTVQVFTDSEYQLPYVLGSAHQGCLPPFPADVFMVPQYGYLTLNNGSQAVGRSSFYCLEYFPSQMLRTGNNFTFSYTFEDVPFHSSYAHSQSLDRLMNPLIDQYLYYLNRTQSNSGTLQQSRLLFSQAGPTSMSLQAKNWLPGPCYRQQRPSKQANDNNNSNFPWTAATKYHLNGRDSLVNPGPAMASHKDDEEKFFPMHGTLIFGKQGTNANDADLEHVMITDEEEIRTTNPVATEQYGNVSNNLQNSNTGPTTENVNHQGALPGMVWQDRDVYLQGPIWAKIPHTDGHFHPSPLMGGFGLKHPPPQIMIKNTPVPANPPTNFSAAKFASFITQYSTGQVSVEIEWELQKENSKRWNPEIQYTSNYNKSVNVDFTVDTNGVYSEPRPIGTRYLTRNL

SEQ ID NO: 1929 - protein, 735 aa, Artificial Sequence
  Synthetic Polypeptide
MAADGYLPDWLEDTLSEGIRQWWKLKPGPPPPKPAERHQDDSRGLVLPGYKYLGPFNGLDKGEPVNEADAAALEHDKAYDRQLDSGDNPYLKYNHADAEFQERLKEDTSFGGNLGRAVFQAKKRVLEPLGLVEEPVKTAPGKKRPVEHSPAEPDSSSGTGKAGQQPARKRLNFSQTGDADSVPDPQPLGQPPAAPTSLGSTTMATGSGAPMADNNEGADGVGNSSGNWHCDSQWLGDRVITTSTRTWALPTYNNHLYKQISSQSGASNDNHYFGYSTPWGYFDFNRFHCHFSPRDWQRLINNNWGFRPKRLNFKLFNIQVKEVTQNDGTTTIANNLTSTVQVFTDSEYQLPYVLGSAHQGCLPPFPADVFMVPQYGYLTLNNGSQAVGRSSFYCLEYFPSQMLRTGNNFTFSYTFEDVPFHSSYAHSQSLDRLMNPLIDQYLYYLNRTQSNSGTLQQSRLLFSQAGPTSMSLQAKNWLPGPCYRQQRLSKQANDNNNSNFPWTAATKYHLNGRDSLVNPGPAMASHKDDEEKFFPMHGTLIFGKQGTNANDADLEHVMITDEEEIRTTNPVATEQYGNVSNNLQNSNTGPTTENVNHQGALPGMVWQDRDVYLQGPIWAKIPHTDGHFHPSPLMGGFGLKHPPPQIMIKNTPVPANPPTNFSAAKFASFITQYSTGQVSVEIEWELQKENSKRWNPEIQYTSNYNKSVNVDFTVDTNGVYSEPRPIGTRYLTRNL

SEQ ID NO: 1930 - protein, 735 aa, Artificial Sequence
  Synthetic Polypeptide
MAADGYLPDWLEDTLSEGIRQWWKLKPGPPPPKPAERHQDDSRGLVLPGYKYLGPFNGLDKGEPVNEADAAALEHDKAYDRQLDSGDNPYLKYNHADAEFQERLKEDTSFGGNLGRAVFQAKKRVLEPLGLVEEPVKTAPGKKRPVEHSPAEPDSSSGTGKAGQQPARKRLNFGQTGDADSVPDPQPLGQPPAAPTSLGSTTMATGSGAPMADNNEGADGVGNSSGNWHCDSQWLGDRVITTSTRTWALPTYNNHLYKQISSQSGASNDNHYFGYSTPWGYFDFNRFHCHFSPRDWQRLINNNWGFRPKRLNFKLFNIQVKEVTQNDGTTTIANNLTSTVQVFTDSEYQLPYVLGSAHQGCLPPFPADVFMVPQYGYLTLNNGSQAVGRSSFYCLEYFPSQMLRTGNNFTFSYTFEDVPFHSSYAHSQSLDRLMNPLIDQYLYYLNRTQSNSGTLQQSRLLFSQAGPTSMSLQAKNWLPGPCYRQQRLSKQANDNNNSNFPWTAATKYHLNGRDSLVNPGPAMASHKDDEEKFFPMHGTLIFGKQGTNANDADLEHVMITDEEEIRTTNPVATEQYGNVSNNLQNSNTGPTTENVNHQGALPGMVWQDRDVYLQGPIWAKIPHTDGHFHPSPLMGGFGLKHPPPQIMIKNTPVPANPPTNFSAAKFASFITQYSTGQVSVEIEWEPQKENSKRWNPEIQYTSNYNKSVNVDFTVDTNGVYSEPRPIGTRYLTRNL

SEQ ID NO: 1931 - protein, 735 aa, Artificial Sequence
  Synthetic Polypeptide
MAADGYLPDWLEDTLSEGIRQWWKLKPGPPPPKPAERHQDDSRGLVLPGYKYLGPFNGLDKGEPVNEADAAALEHDKAYDRQLDSGDNPYLKYNHADAEFQERLKEDTSFGGNLGRAVFQAKKRVLEPLGLVEEPVKTAPGKKRPVEHSPAEPDSSSGTGKAGQQPARKRLNFGQTGDADSVPDPQPLGQPPAAPTSLGSTTMATGSGAPMADNNEGADGVGNSSGNWHCDSQWLGDRVITTSTRTWALPTYNNHLYKQISSQSGASNDNHYFGYSTPWGYFDFNRFHCHFSPRDWQRLINNNWGFRPKRPNFKLFNIQVKEVTQNDGTTTIANNLTSTVQVFTDSEYQLPYVLGSAHQGCLPPFPADVFMVPQYGYLTLNNGSQAVGRSSFYCLEYFPSQMLRTGNNFTFSYTFEDVPFHSSYAHSQSLDRLMNPLIDQYLYYLNRTQSNSGTLQQSRLLFSQAGPTSMSLQAKNWLPGPCYRQQRLSKQANDNNNSNFPWTAATKYHLNGRDSLVNPGPAMASHKDDEEKFFPMHGTLIFGKQGTNANDADLEHVMITDEEEIRTTNPVATEQYGNVSNNLQNSNTGPTTENVNHQGALPGMVWQDRDVYLQGPIWAKIPHTDGHFHPSPLMGGFGLKHPPPQIMIKNTPVPANPPTNFSAAKFASFITQYSTGQVSVEIEWELQKENSKRWNPEIQYTSNYNKSVNVDFTVDTNGVYSEPRPIGTRYLTRNL

SEQ ID NO: 1932 - protein, 735 aa, Artificial Sequence
  Synthetic Polypeptide
MAADGYLPDWLEDTLSEGIRQWWKLKPGPPPPKPAERHQDDSRGLVLPGYKYLGPFNGLDKGEPVNEADAAALEHDKAYDRQLDSGDNPYLKYNHADAEFQERLKEDTSFGGNLGRAVFQAKKRVLEPLGLVEEPVKTAPGKKRPVEHSPAEPDSSSGTGKAGQQPARKRLNFGQTGDADSVPDPQPLGQPPAAPTSLGSTTMATGSGAPMADNNEGADGVGNSSGNWHCDSQWLGDRVITTSTRTWALPTYNNHLYKQISSQSGASNDNHYFGYSTPWGYFDFNRFHCHFSPRDWQRLINNNWGFRPKRLNFKLFNIQVKEVTQNDGTTTIANNLTSTVQVFTDSEYQLPYVLGSAHQGCLPPFPADVFMVPQYGYLTLNNGSQAVGRSSFYCLEYFPSQMLRTGNNFTFSYTFEDVPFHSSYAHSQSLDRLMNPLIDQYLYYLNRTQSNSGTLQQSRLLFSQAGPTSMSLQAKNWLPGPCYRQQRLSKQANDNNNSNFPWTAATKYHLNGRDSLVNPGPAMASHKDDEEKFFPMHGTLIFGKQGTNANDADLEHVVITDEEEIRTTNPVATEQYGNVSNNLQNSNTGPTTENVNHQGALPGMVWQDRDVYLQGPIWAKIPHTDGHFHPSPLMGGFGLKHPPPQIMIKNTPVPANPPTNFSAAKFASFITQYSTGQVSVEIEWELQKENSKRWNPEIQYTSNYNKSVNVDFTVDTNGVYSEPRPIGTRYLTRNL

SEQ ID NO: 1933 - protein, 735 aa, Artificial Sequence
  Synthetic Polypeptide
MAADGYLPDWLEDTLSEGIRQWWKLKPGPPPPKPAERHQDDSRGLVLPGYKYLGPFNGLDKGEPVNEADAAALEHDKAYDRQLDSGDNPYLKYNHADAEFQERLKEDTSFGGNLGRAVFQAKKRVLEPLGLVEEPVKTAPGKKRPVEHSPAEPDSSSGTGKAGQQPARKRLNFGQTGDADSVPDPQPLGQPPAAPTSLGSTTMATGSGAPMADNNEGADGVGNSSGNWHCDSQWLGDRVITTSTRTWALPTYNNHLYKQISSQSGASNDNHYFGYSTPWGYFDFNRFHCHFSPRDWQRLINNNWGFRPKRLNFKLFNIQVKEVTQNDGTTTIANNLTSTVQVFTDSEYQLPYVLGSAHQGCLPPFPADVFMVPQYGYLTLNNGSQAVGRSSFYCLEYFPSQMLRTGNNFTFSYTFEDVPFHSSYAHSQSLDRLMNPLIDQYLYYLNRTQSNSGTLQQSRLLFSQAGPTSMSLQAKNWLPGPCYRQQRLSKQANDNNNSNFPWTAATKYHLNGRDSLVNPGPAMASHKDDEEKFFPMHGTLIFGKQGTNANDADLEHVMITDEEEIRTTNPVATEQYGNVSNNLQNSNTGPTTENVNHQGALPGMVWRDRDVYLQGPIWAKIPHTDGHFHPSPLMGGFGLKHPPPQIMIKNTPVPANPPTNFSAAKFASFITQYSTGQVSVEIEWELQKENSKRWNPEIQYTSNYNKSVNVDFTVDTNGVYSEPRPIGTRYLTRNL

SEQ ID NO: 1934 - protein, 735 aa, Artificial Sequence
  Synthetic Polypeptide
MAADGYLPDWLEDTLSEGIRQWWKLKPGPPPPKPAERHQDDSRGLVLPGYKYLGPFNGLDKGEPVNEADAAALEHDKAYDRQLDSGDNPYLKYNHADAEFQERLKEDTSFGGNLGRAVFQAKKRVLEPLGLVEEPVKTAPGKKRPVEHSPAEPDSSSGTGKAGQQPARKRLNFGQTGGADSVPDPQPLGQPPAAPTSLGSTTMATGSGAPMADNNEGADGVGNSSGNWHCDSQWLGDRVITTSTRTWALPTYNNHLYKQISSQSGASNDNHYFGYSTPWGYFDFNRFHCHFSPRDWQRLINNNWGFRPKRLNFKLFNIQVKEVTQNDGTTTIANNLTSTVQVFTDSEYQLPYVLGSAHQGCLPPFPADVFMVPQYGYLTLNNGSQAVGRSSFYCLEYFPSQMLRTGNNFTFSYTFEDVPFHSSYAHSQSLDRLMNPLIDQYLYYLNRTQSNSGTLQQSRLLFSQAGPTSMSLQAKNWLPGPCYRQQRLSKQANDNNNSNFPWTAATKYHLNGRDSLVNPGPAMASHKDDEEKFFPMHGTLIFGKQGTNANDADLEHVMITDEEEIRTTNPVATEQYGNVSNNLQNSNTGPTTENVNHQGALPGMVWQDRDVYLQGPIWAKIPHTDGHFHPSPLMGGFGLKHPPPQIMIKNTPVPANPPTNFSAAKFASFITQYSTGQVSVEIEWELQKENSKRWNPEIQYTSNYNKSVNVDFTVDTNGVYSEPRPIGTRYLTRNL

SEQ ID NO: 1935 - protein, 735 aa, Artificial Sequence
  Synthetic Polypeptide
MAADGYLPDWLEDTLSEGIRQWWKLKPGPPPPKPAERHQDDSRGLVLPGYKYLGPFNGLDKGEPVNEADAAALEHDKAYDRQLDSGDNPYLKYNHADAEFQERLKEDTSFGGNLGRAVFQAKKRVLEPLGLVEEPVKTAPGKKRPVEHSPAEPDSSSGTGKAGQQPARKRLNFGQTGDADSVPDPQPLGQPPAAPTSLGSTTMATGSGAPMADNNEGTDGVGNSSGNWHCDSQWLGDRVITTSTRTWALPTYNNHLYKQISSQSGASNDNHYFGYSTPWGYFDFNRFHCHFSPRDWQRLINNNWGFRPKRLNFKLFNIQVKEVTQNDGTTTIANNLTSTVQVFTDSEYQLPYVLGSAHQGCLPPFPADVFMVPQYGYLTLNNGSQAVGRSSFYCLEYFPSQMLRTGNNFTFSYTFEDVPFHSSYAHSQSLDRLMNPLIDQYLYYLNRTQSNSGTLQQSRLLFSQAGPTSMSLQAKNWLPGPCYRQQRLSKQANDNNNSNFPWTAATKYHLNGRDSLVNPGPAMASHKDDEEKFFPMHGTLIFGKQGTNANDADLEHVMITDEEEIRTTNPVATEQYGNVSNNLQNSNTGPTTENVNHQGALPGMVWQDRDVYLQGPIWAKIPHTDGHFHPSPLMGGFGLKHPPPQIMIKNTPVPANPPTNFSAAKFASFITQYSTGQVSVEIEWELQKENSKRWNPEIQYTSNYNKSVNVDFTVDTNGVYSEPRPIGTRYLTRNL

SEQ ID NO: 1936 - protein, 735 aa, Artificial Sequence
  Synthetic Polypeptide
MAADGYLPDWLEDTLSEGIRQWWKLKPGPPPPKPAERHQDDSRGLVLPGYKYLGPFNGLDKGEPVNEADAAALEHDKAYDRQLDSGDNPYPKYNHADAEFQERLKEDTSFGGNLGRAVFQAKKRVLEPLGLVEEPVKTAPGKKRPVEHSPAEPDSSSGTGKAGQQPARKRLNFGQTGDADSVPDPQPLGQPPAAPTSLGSTTMATGSGAPMADNNEGADGVGNSSGNWHCDSQWLGDRVITTSTRTWALPTYNNHLYKQISSQSGASNDNHYFGYSTPWGYFDFNRFHCHFSPRDWQRLINNNWGFRPKRLNFKLFNIQVKEVTQNDGTTTIANNLTSTVQVFTDSEYQLPYVLGSAHQGCLPPFPADVFMVPQYGYLTLNNGSQAVGRSSFYCLEYFPSQMLRTGNNFTFSYTFEDVPFHSSYAHSQSLDRLMNPLIDQYLYYLNRTQSNSGTLQQSRLLFSQAGPTSMSLQAKNWLPGPCYRQQRLSKQANDNNNSNFPWTAATKYHLNGRDSLVNPGPAMASHKDDEEKFFPMHGTLIFGKQGTNANDADLEHVMITDEEEIRTTNPVATEQYGNVSNNLQNSNTGPTTENVNHQGALPGMVWQDRDVYLQGPIWAKIPHTDGHFHPSPLMGGFGLKHPPPQIMIKNTPVPANPPTNFSAAKFASFITQYSTGQVSVEIEWELQKENSKRWNPEIQYTSNYNKSVNVDFTVDTNGVYSEPRPIGTRYLTRNL

SEQ ID NO: 1937 - protein, 735 aa, Artificial Sequence
  Synthetic Polypeptide
MAADGYLPDWLEDTLSEGIRQWWKLKPGPPPPKPAERHQDDSRGLVLPGYKYLGPFNGLDKGEPVNEADAAALEHDKAYDRQLDSGDNPYLKYNHADAEFQERLKEDTSFGGNLGRAVFQAKKRVLEPLGLVEEPVKTAPGKKRPVEHSPAEPDSSSGTGKAGQQPARKRLNFGQTGDADSVPDPQPLGQPPAAPTSLGSTTMATGSGAPMADNNEGADGVGNSSGNWHCDSQWLGDRVITTSTRTWALPTYNNHLYKQISSQSGASNDNHYFGYSTPWGYFDFNRFHCHFSPRDWQRLINNNWGFRPKRLNFKLFNIQVKEVTQNDGTTTIANNLTSTVQVFTDSEYQLPYVLGSAHQGCLPPFPADVFMVPQYGYLTLNNGSQAVGRSSFYCLEYFPSQMLRTGNNFTFSYTFEDVPFHSSYAHSQSLDRLMNPLIDQYLYYLNRTQSNSGTLQQSRLLFSQAGPTSMSLQAKNWLPGPCYRQQRLSKQANDNNNSNFPWTAATKYHLNGRDSLVNPGPAMASHKDDEEKFFPMHGTLIFGKQGTNANDADLEHVMITDEEEIRATNPVATEQYGNVSNNLQNSNTGPTTENVNHQGALPGMVWQDRDVYLQGPIWAKIPHTDGHFHPSPLMGGFGLKHPPPQIMIKNTPVPANPPTNFSAAKFASFITQYSTGQVSVEIEWELQKENSKRWNPEIQYTSNYNKSVNVDFTVDTNGVYSEPRPIGTRYLTRNL

SEQ ID NO: 1938 - protein, 735 aa, Artificial Sequence
  Synthetic Polypeptide
MAADGYLPDWLEDTLSEGIRQWWKLKPGPPPPKPAERHQDDSRGLVLPGYKYLGPFNGLDKGEPVNEADAAALEHDKAYDRQLDSGDNPYLKYNHADAEFQERLKEDTSFGGNLGRAVFQAKKRVLEPLGLVEEPVKTAPGKKRPVEHSPAEPDSSSGTGKAGQQPARKRLNFGQTGDADSVPDPQPLGQPPAAPTSLGSTTMATGSGAPMADNNEGADGVGNSSGNWHCDSQWLGDRVITTSTRTWALPTYNNHLYKQISSQSGASNDNHYFGYSTPWGYFDFNRFHCRFSPRDWQRLINNNWGFRPKRLNFKLFNIQVKEVTQNDGTTTIANNLTSTVQVFTDSEYQLPYVLGSAHQGCLPPFPADVFMVPQYGYLTLNNGSQAVGRSSFYCLEYFPSQMLRTGNNFTFSYTFEDVPFHSSYAHSQSLDRLMNPLIDQYLYYLNRTQSNSGTLQQSRLLFSQAGPTSMSLQAKNWLPGPCYRQQRLSKQANDNNNSNFPWTAATKYHLNGRDSLVNPGPAMASHKDDEEKFFPMHGTLIFGKQGTNANDADLEHVMITDEEEIRTTNPVATEQYGNVSNNLQNSNTGPTTENVNHQGALPGMVWQDRDVYLQGPIWAKIPHTDGHFHPSPLMGGFGLKHPPPQIMIKNTPVPANPPTNFSAAKFASFITQYSTGQVSVEIEWELQKENSKRWNPEIQYTSNYNKSVNVDFTVDTNGVYSEPRPIGTRYLTRNL

SEQ ID NO: 1939 - protein, 735 aa, Artificial Sequence
  Synthetic Polypeptide
MAADGYLPDWLEDTLSEGIRQWWKLKPGPPPPKPAERHQDDSRGLVLPGYKYLGPFNGLDKGEPVNEADAAALEHDKAYDRQLDSGDNPYLKYNHADAEFQERLKEDTSFGGNLGRAVFQAKKRVLEPLGLVEEPVKTAPGKKRPVEHSPAEPDSSSGTGKAGQQPARKRLNFGQTGDADSVPDPQPLGQPPAAPTSLGSTTMATGSGAPMADNNEGADGVGNSSGNWHCDSQWLGDRVITTSTRTWALPTYNNHLYKQISSQSGASNDNHYFGYSTPWGYFDFNRFHCHFSPRDWQRLINNNWGFRPKRLNFKLFNIQVKEVTQNDGTTTIANNLTSTVQVFTDSEYQLPYVLGSAHQGCLPPFPADVFMVPQYGYLTLNNGSQAVGRSSFYCLEYFPSQMLRTGNNFTFSYTFEDVPFRSSYAHSQSLDRLMNPLIDQYLYYLNRTQSNSGTLQQSRLLFSQAGPTSMSLQAKNWLPGPCYRQQRLSKQANDNNNSNFPWTAATKYHLNGRDSLVNPGPAMASHKDDEEKFFPMHGTLIFGKQGTNANDADLEHVMITDEEEIRTTNPVATEQYGNVSNNLQNSNTGPTTENVNHQGALPGMVWQDRDVYLQGPIWAKIPHTDGHFHPSPLMGGFGLKHPPPQIMIKNTPVPANPPTNFSAAKFASFITQYSTGQVSVEIEWELQKENSKRWNPEIQYTSNYNKSVNVDFTVDTNGVYSEPRPIGTRYLTRNL

SEQ ID NO: 1940 - protein, 735 aa, Artificial Sequence
  Synthetic Polypeptide
MAADGYLPDWLEDTLSEGIRQWWKLKPGPPPPKPAERHQDDSRGLVLPGYKYLGPFNGLDKGEPVNEADAAALEHDKAYDRQLDSGDNPYLKYNHADAEFQERLKEDTSFGGNLGRAVFQAKKRVLEPLGLVEEPVKTAPGKKRPVEHSPAEPDSSSGTGKAGQQPARKRLNFGQTGDADSVPDPQPLGQPPAAPTSLGSTTMATGSGAPMADNNEGADGVGNSSGNWHCDSQWLGDRVITTSTRTWALPTYSNHLYKQISSQSGASNDNHYFGYSTPWGYFDFNRFHCHFSPRDWQRLINNNWGFRPKRLNFKLFNIQVKEVTQNDGTTTIANNLTSTVQVFTDSEYQLPYVLGSAHQGCLPPFPADVFMVPQYGYLTLNNGSQAVGRSSFYCLEYFPSQMLRTGNNFTFSYTFEDVPFHSSYAHSQSLDRLMNPLIDQYLYYLNRTQSNSGTLQQSRLLFSQAGPTSMSLQAKNWLPGPCYRQQRLSKQANDNNNSNFPWTAATKYHLNGRDSLVNPGPAMASHKDDEEKFFPMHGTLIFGKQGTNANDADLEHVMITDEEEIRTTNPVATEQYGNVSNNLQNSNTGPTTENVNHQGALPGMVWQDRDVYLQGPIWAKIPHTDGHFHPSPLMGGFGLKHPPPQIMIKNTPVPANPPTNFSAAKFASFITQYSTGQVSVEIEWELQKENSKRWNPEIQYTSNYNKSVNVDFTVDTNGVYSEPRPIGTRYLTRNL

SEQ ID NO: 1941 - protein, 735 aa, Artificial Sequence
  Synthetic Polypeptide
MAADGYLPDWLEDTLSEGIRQWWKLKPGPPPPKPAERHQDDSRGLVLPGYKYLGPFNGLDKGEPVNEADAAALEHDKAYDRQLDSGDNPYLKYNHADAEFQERLKEDTSFGGNLGRAVFQAKKRVLEPLGLVEEPVKTAPGKKRPVEHSPAEPDSSSGTGKAGQQPARKRLNFGQTGDADSVPDPQPLGQPPAAPTSLGSTTMATGSGAPMADNNEGADGVGNSSGNWHCDSQWLGDRVITTSTRTWALPTYNNHLYKQISSQSGASNDNHYFGYSTPWGYFDFNRFHCHFSPRDWQRLINNNWGFRPKRLNFKPFNIQVKEVTQNDGTTTIANNLTSTVQVFTDSEYQLPYVLGSAHQGCLPPFPADVFMVPQYGYLTLNNGSQAVGRSSFYCLEYFPSQMLRTGNNFTFSYTFEDVPFHSSYAHSQSLDRLMNPLIDQYLYYLNRTQSNSGTLQQSRLLFSQAGPTSMSLQAKNWLPGPCYRQQRLSKQANDNNNSNFPWTAATKYHLNGRDSLVNPGPAMASHKDDEEKFFPMHGTLIFGKQGTNANDADLEHVMITDEEEIRTTNPVATEQYGNVSNNLQNSNTGPTTENVNHQGALPGMVWQDRDVYLQGPIWAKIPHTDGHFHPSPLMGGFGLKHPPPQIMIKNTPVPANPPTNFSAAKFASFITQYSTGQVSVEIEWELQKENSKRWNPEIQYTSNYNKSVNVDFTVDTNGVYSEPRPIGTRYLTRNL

SEQ ID NO: 1942 - protein, 735 aa, Artificial Sequence
  Synthetic Polypeptide
MAADGYLPDWLEDTLSEGIRQWWKLKPGPPPPKPAERHQDDSRGLVLPGYKYLGPFNGLDKGEPVNEADAAALEHDKAYDRQLDSGDNPYLKYNHADAEFQERLKEDTSFGGNLGRAVFQAKKRVLEPLGLVEEPVKTAPGKKRPVEHSPAEPDSSSGTGKAGQQPARKRLNFGQTGDADSVPDPQPLGQPPAAPTSLGSTTMATGSGAPMADNNEGADGVGNSSGNWHCDSQWLGDRVITTSTRTWALPTYNNHLYKQISSQSGASNGNHYFGYSTPWGYFDFNRFHCHFSPRDWQRLINNNWGFRPKRLNFKLFNIQVKEVTQNDGTTTIANNLTSTVQVFTDSEYQLPYVLGSAHQGCLPPFPADVFMVPQYGYLTLNNGSQAVGRSSFYCLEYFPSQMLRTGNNFTFSYTFEDVPFHSSYAHSQSLDRLMNPLIDQYLYYLNRTQSNSGTLQQSRLLFSQAGPTSMSLQAKNWLPGPCYRQQRLSKQANDNNNSNFPWTAATKYHLNGRDSLVNPGPAMASHKDDEEKFFPMHGTLIFGKQGTNANDADLEHVMITDEEEIRTTNPVATEQYGNVSNNLQNSNTGPTTENVNHQGALPGMVWQDRDVYLQGPIWAKIPHTDGHFHPSPLMGGFGLKHPPPQIMIKNTPVPANPPTNFSAAKFASFITQYSTGQVSVEIEWELQKENSKRWNPEIQYTSNYNKSVNVDFTVDTNGVYSEPRPIGTRYLTRNL

SEQ ID NO: 1943 - protein, 735 aa, Artificial Sequence
  Synthetic Polypeptide
MAADGYLPDWLEDTLSEGIRQWWKLKPGPPPPKPAERHQDDSRGLVLPGYKYLGPFNGLDKGEPVNEADAAALEHDKAYDRQLDSGDNPYLKYNHADAEFQERLKEDTSFGGNLGRAVFQAKKRVLEPLGLVEEPVKTAPGKKRPVEHSPAEPDSSSGTGKAGQQPARKRLNFGQTGDADSVPDPQPLGQPPAAPTSLGSTTMATGSGAPMADNNEGADGVGNSSGNWHCDSQWLGDRVITTSTRTWALPTYNNHLYKQISSQSGASNDNHYFGYSTPWGYFDFNRFHCHFSPRDWQRLINNNWGFRPKRLNFKLFNIQVKEVTQNDGTTTIANNLTSTVQVFTDSEYQLPYVLGSAHQGCLPPFPADVFMVPQYGYLTLNNGSQAVGRSSFYCLEYFPSQMLRTGNNFTFSYTFEDVPFHSSYAHSQSLDRLMNPLIDQYLYYLNRTQSNSGTLQQSRLLFSQAGPTSMSLQAKNWLPGPCYRQQRLSKQANDNNNSNFPWTAATKYHLNGRDSLVNPGPAMASHKDDEEKFFPMHGTLIFGKQGTNANDADLEHVMITDEEEIRTANPVATEQYGNVSNNLQNSNTGPTTENVNHQGALPGMVWQDRDVYLQGPIWAKIPHTDGHFHPSPLMGGFGLKHPPPQIMIKNTPVPANPPTNFSAAKFASFITQYSTGQVSVEIEWELQKENSKRWNPEIQYTSNYNKSVNVDFTVDTNGVYSEPRPIGTRYLTRNL

SEQ ID NO: 1944 - protein, 735 aa, Artificial Sequence
  Synthetic Polypeptide
MAADGYLPDWLEDTLSEGIRQWWKLKPGPPPPKPAERHQDDSRGLVLPGYKYLGPFNGLDKGEPVNEADAAALEHDKAYDRQLDSGDNPYLKYNHADAEFQERLKEDTSFGGNLGRAVFQAKKRVLEPLGLVEEPVKTAPGKKRPVEHSPAEPDSSSGTGKAGQQPARKRLNFGQTGDADSVPDPQPLGQPPAAPTSLGSTTMATGSGAPMADNNEGADGVGNSSGNWHCDSQWLGDRVITTSTRTWALPTYNNHLYKQISSQSGASNDNHYFGYSTPWGYFDFNRFHCHFSPRDWQRLINNNWGFRPKRLNFKLFNIQVKEVTQNDGTTTIANNLTSTVQVFTDSEYQLPYVLGSAHQGCLPPFPADVFMVPQYGYLTLNNGSQAVGRSSFYCLEYFPSQMLRTGNNFTFSYTFEGVPFHSSYAHSQSLDRLMNPLIDQYLYYLNRTQSNSGTLQQSRLLFSQAGPTSMSLQAKNWLPGPCYRQQRLSKQANDNNNSNFPWTAATKYHLNGRDSLVNPGPAMASHKDDEEKFFPMHGTLIFGKQGTNANDADLEHVMITDEEEIRTTNPVATEQYGNVSNNLQNSNTGPTTENVNHQGALPGMVWQDRDVYLQGPIWAKIPHTDGHFHPSPLMGGFGLKHPPPQIMIKNTPVPANPPTNFSAAKFASFITQYSTGQVSVEIEWELQKENSKRWNPEIQYTSNYNKSVNVDFTVDTNGVYSEPRPIGTRYLTRNL

SEQ ID NO: 1945 - protein, 735 aa, Artificial Sequence
  Synthetic Polypeptide
MAADGYLPDWLEDTLSEGIRQWWKLKPGPPPPKPAERHQDDSRGLVLPGYKYLGPFNGLDKGEPVNEADAAALEHDKAYDRQLDSGDNPYLKYNHADAEFQERLKEDTSFGGNLGRAVFQAKKRVLEPLGLVEEPVKTAPGKKRPVEHSPAEPDSSSGTGKAGQQPARKRLNFGQTGDADSVPDPQPLGQPPAAPTSLGSTTMATGSGAPMADNNEGADGVGNSSGNWHCDSQWLGDRVITTSTRTWALPTYNNHLYKQISSQSGASNDNHYFGYSTPWGYFDFNRFHCHFSPRDWQRLINNNWGFRPKRLNFKLFNIQVKEVTQNDGTTTIANNLTSTVQVFTDSEYQLPYVLGSAHQGCLPPFPADVFMVPQYGYLTLNNGSQAVGRSSFYCLEYFPSQMLRTGNNFTFSYTFEDVPFHSSYAHSQSLDRLMNPLIDQYLYYLNRTQSNSGTLQQSRLLFSQAGPTSMSLQAKNWLPGPCYRQQRLSKQANDNNNSNFPWTAATKYHLNGRDSLVNPGPAMASHKDDEEKFFPMHGTLIFGKQGTNANDADLEHVMITDEEEIRTTNPVATEQYGNVSNNLQNSNTGPTTENVNHQGALPGMVWQDRDVYLQGPIWAKIPHTDGHFHPSPLMGGFGLKHPPPQIMIKNTPVPANPPTNFSAAKFASFITQYSTGQVSVEIEWELQKENSKRWNPEIQYTSNYSKSVNVDFTVDTNGVYSEPRPIGTRYLTRNL

SEQ ID NO: 1946 - protein, 735 aa, Artificial Sequence
  Synthetic Polypeptide
MAADGYLPDWLEDTLSEGIRQWWRLKPGPPPPKPAERHQDDSRGLVLPGYKYLGPFNGLDKGEPVNEADAAALEHDKAYDRQLDSGDNPYLKYNHADAEFQERLKEDTSFGGNLGRAVFQAKKRVLEPLGLVEEPVKTAPGKKRPVEHSPAEPDSSSGTGKAGQQPARKRLNFGQTGDADSVPDPQPLGQPPAAPTSLGSTTMATGSGAPMADNNEGADGVGNSSGNWHCDSQWLGDRVITTSTRTWALPTYNNHLYKQISSQSGASNDNHYFGYSTPWGYFDFNRFHCHFSPRDWQRLINNNWGFRPKRLNFKLFNIQVKEVTQNDGTTTIANNLTSTVQVFTDSEYQLPYVLGSAHQGCLPPFPADVFMVPQYGYLTLNNGSQAVGRSSFYCLEYFPSQMLRTGNNFTFSYTFEDVPFHSSYAHSQSLDRLMNPLIDQYLYYLNRTQSNSGTLQQSRLLFSQAGPTSMSLQAKNWLPGPCYRQQRLSKQANDNNNSNFPWTAATKYHLNGRDSLVNPGPAMASHKDDEEKFFPMHGTLIFGKQGTNANDADLEHVMITDEEEIRTTNPVATEQYGNVSNNLQNSNTGPTTENVNHQGALPGMVWQDRDVYLQGPIWAKIPHTDGHFHPSPLMGGFGLKHPPPQIMIKNTPVPANPPTNFSAAKFASFITQYSTGQVSVEIEWELQKENSKRWNPEIQYTSNYNKSVNVDFTVDTNGVYSEPRPIGTRYLTRNL

SEQ ID NO: 1947 - protein, 735 aa, Artificial Sequence
  Synthetic Polypeptide
MAADGYLPDWLEDTLSEGIRQWWKLKPGPPPPKPAERHKDDSRGLVLPGYKYLGPFNGLDKGEPVNEADAAALEHDKAYDRQLDSGDNPYLKYNHADAEFQERLKEDTSFGGNLGRAVFQAKKRVLEPLGLVEEPVKTAPGKKRPVEHSPVEPDSSSGTGKAGQQPARKRLNFGQTGDADSVPDPQPLGQPPAAPTSLGSTTMATGSGAPMADNNEGADGVGNSSGNWHCDSQWLGDRVITTSTRTWALPTYNNHLYKQISSQSGASNDNHYFGHSTPWGYFDFNRFHCHFSPRDWQRLINNNWGFRPKRLNFKLFNIQVKEVTQNDGTTTIANNLTSTVQVFTDSEYQLPYVLGSAHQGCLPPFPADVFMVPQYGYLTLNNGSQAVGRSSFYCLEYFPSQMLRTGNNFTFSYTFEDVPFHSSYAHSQSLDRLMNPLIDQYLYYLNKTQSNSGTLQQSRLLFSQAGPTSMSLQAKNWLPGPCYRQQRLSKQANDNNNSNFPWTAATKYHLNGRDSLVNPGPAMASHKDDEEKFFPMHGTLIFGKQGTNANDADLDNVMITDEEEIRTTNPVATEQYGTVSNNLQNSNTGPTTGTVNHQGALPGMVWQDRDVYLQGPIWAKIPHTDGHFHPSPLMGGFGLKHPPPQIMIKNTPVPANPPTNFSSAKSASFITQYSTGQVSVEIEWELQKENSKRWNPEIQYTSNYNKSVNVDFTVDTNGVYSEPRPIGTRYLTRNL

SEQ ID NO: 1948 - protein, 735 aa, Artificial Sequence
  Synthetic Polypeptide
MAADGYLPDWLEDTLSEGIRQWWKLKPGPPPPKPAERHKDDSRGLVLPGYKYLGPFNGLDKGEPVNEADAAALEHDKAYDRQLDSGDNPYLKYNHADAEFQERLKEDTSFGGNLGRAVFQAKKRVLEPLGLVEEPVKTAPGKKRPVEHSPVEPDSSSGTGKAGQQPARKRLNFGQTGDADSVPDPQPLGQPPAAPSGLGTNTMATGSGAPMADNNEGADGVGNSSGNWHCDSTWMGDRVITTSTRTWALPTYNNHLYKQISSQSGASNDNHYFGYSTPWGYFDFNRFHCHFSPRDWQRLINNNWGFRPKRLNFKLFNIQVKEVTQNDGTTTIANNLTSTVQVFTDSEYQLPYVLGSAHQGCLPPFPADVFMVPQYGYLTLNNGSQAVGRSSFYCLEYFPSQMLRTGNNFTFSYTFEDVPFHSSYAHSQSLDRLMNPLIDQYLYYLNKTQSNSGTLQQSRLLFSQAGPTSMSLQAKNWLPGPCYRQQRLSKQANDNNNSNFPWTAATKYHLNGRDSLVNPGPAMASHKDDEEKFFPMHGTLIFGKQGTNANDADLDNVMITDEEEIRTTNPVATEQYGTVSNNLQNSNTGPTTGTVNHQGALPGMVWQDRDVYLQGPIWAKIPHTDGHFHPSPLMGGFGLKHPPPQIMIKNTPVPANPPTNFSSAKFASFITQYSTGQVSVEIEWELQKENSKRWNPEIQYTSNYNKSVNVDFTVDTNGVYSEPRPIGTRYLTRNL

SEQ ID NO: 1949 - protein, 735 aa, Artificial Sequence
  Synthetic Polypeptide
MAADGYLPDWLEDTLPEGIRQWWKLKPGPPPPKPAERHKDDSRGLVLPGYKYLGPFNGLDKGEPVNEADAAALEHDKAYDRQLDSGDNPYLKYNHADAEFQERLKEDTSFGGNLGRAVFQAKKRVLEPLGLVEEPVKTAPGKKRPVEHSPVEPDSSSGTGKAGQQPARKRLNFGQTGDADSVPDPQPLGQPPAAPTSLGSTTMATGSGAPMADNNEGADGVGNSSGNWHCDSQWLGDRVITTSTRTWALPTYNNHLYKQISSQSGASNDNHYFGHSTPWGYFDFNRFHCHFSPRDWQRLINNNWGFRPKRLNFKLFNIQVKEVTQNDGTTTIANNLTSTVQVFTDSEYQLPYVLGSAHQGCLPPFPADVFMVPQYGYLTLNNGSQAVGRSSFYCLEYFPSQMLRTGNNFTFSYTFEDVPFHSSYAHSQSLDRLMNPLIDQYLYYLNKTQSNSGTLQQSRLLFSQAGPTSMSLQAKNWLPGPCYRQQRLSKQANDNNNSNFPWTAATKYHLNGRDSLVNPGPAMASHKDDEEKFFPMHGTLIFGKQGTNANDADLDNVMITDEEEIRTTNPVATEQYGTVSNNLQNSNTGPTTGTVNHQGALPGMVWQDRDVYLQGPIWAKIPHTDGHFHPSPLMGGFGLKHPPPQIMIKNTPVPANPPTNFSSAKFASFITQYSTGQVSVEIEWELQKENSKRWNPEIQYTSNYNKSVNVDFTVDTNGVYSEPRPIGTRYLTRNL

SEQ ID NO: 1950 - protein, 735 aa, Artificial Sequence
  Synthetic Polypeptide
MAADGYLPDWLEDTLSEGIRQWWKLKPGPPPPKPAERHKDDSRGLVLPGYKYLGPFNGLDKGEPVNEADAAALEHDKAYDRQLDSGDNPYLKYNHADAEFQERLKEDTSFGGNLGRAVFQAKKRVLEPLGLVEEPVKTAPGKKRPVEHSPVEPDSSSGTGKAGQQPARKRLNFGQTGDADSVPDPQPLGQTPAAPTSLGSTTMATGSGAPMADNNEGADGVGNSSGNWHCDSQWLGDRVITTSTRTWALPTYNNHLYKQISSQSGASNDNHYFGYSTPWGYFDFNRFHCHFSPRDWQRLINNNWGFRPKRLNFKLFNIQVKEVTQNDGTTTIANNLTSTVQVFTDSEYQLPYVLGSAHQGCLPPFPADVFMVPQYGYLTLNNGSQAVGRSSFYCLEYFPSQMLRTGNNFTFSYTFEDVPFHSSYAHSQSLDRLMNPLIDQYLYYLNKTQSNSGTLQQSRLLFSQAGPTSMSLQAKNWLPGPCYRQQRLSKQANDNNNSNFPWTAATKYHLNGRDSLVNPGPAMASHKDDEEKFFPMHGTLIFGKQGTNANDADLDNVMITDEEEIRTTNPVATEQYGTVSNNLQNSNTGPTTGTVNHQGALPGMVWQDRDVYLQGPIWAKIPHTDGHFHPSPLMGGFGLKHPPPQIMIKNTPVPANPPTNFSSAKFASFITQYSTGQVGVEIEWELQKENSKRWNPEIQYTSNYNKSVNVDFTVDTNGVYSEPRPIGTRYLTRNL

SEQ ID NO: 1951 - protein, 735 aa, Artificial Sequence
  Synthetic Polypeptide
MAADGYLPDWLEDTLSEGIRQWWKLKPGPPPPKPAERHKDDSRGLVLPGYKYLGPFNGLDKGEPVNEADAAALEHDKAYDRQLDSGDNPYLKYNHADAEFQERLKEDTSFGGNLGRAVFQAKKRVLEPLGLVEEPVKTAPGKKRPVEHSPVEPDSSSGTGKAGQQPARKRLNFGQTGDADSVPDPQPLGQTPAAPTSLGSTTMATGSGAPMADNNEGADGVGNSSGNWHCDSQWLGDRVITTSTRTWALPTYNNHLYKQISSQSGASNDNHYFGYSTPWGYFDFNRFHCHFSPRDWQRLINNNWGFRPKRLNFKLFNIQVKEVTQNDGTTTIANNLTSTVQVFTDSEYQLPYVLGSAHQGCLPPFPADVFMVPQYGYLTLNNGSQAVGRSSFYCLEYFPSQMLRTGNNFTFSYTFEDVPFHSSYAHSQSLDRLMNPLIDQYLYYLNKTQSNSGTLQQSRLLFSQAGPTSMSLQAKNWLPGPCYRQQRLSKQANDNNNSNFPWTAATKYHLNGRDSLVNPGPAMASHKDDEEKFFPMHGTLIFGKQGTNANDADLDNVMITDEEEIRTTNPVATEQYGTVSNNLQNSNTGPTTGTVNHQGALPGMVWQDRDVYLQGPIWAKIPHTDGHFHPSPLMGGFGLKHPPPQIMIKNTPVPANPPTNFSSAKFASFITQYSTGQVSVEIEWELQKENSKRWNPEIQYTSNYNKSVNVDFTVDTNGVYSEPRPIGTRYLTRNL

SEQ ID NO: 1952 - protein, 735 aa, Artificial Sequence
  Synthetic Polypeptide
MAADGYLPDWLEDTLSEGIRQWWKLKPGPPPPKPAERHKDDSRGLVLPGYKYLGPFNGLDKGEPVNEADAAALEHDKAYDRQLDSGDNPYLKYNHADAEFQERLKEDTSFGGNLGRAVFQAKKRVLEPLGLVEEPVKTAPGKKRPVEHSPVEPDSSSGTGKAGQQPARKRLNFGQTGDADSVPDPQPLGQPPAAPTSLGSTTMATGSGAPMADNNEGADGVGNSSGNRHCDSQWLGDRVITTSTRTWALPTYNNHLYKQISSQSGASNDNHYFGHSTPWGYFDFNRFHCHFSPRDWQRLINNNWGFRPKRLNFKLFNIQVKEVTQNDGTTTIANNLTSTVQVFTDSEYQLPYVLGSAHQGCLPPFPADVFMVPQYGYLTLNNGSQAVGRSSFYCLEYFPSQMLRTGNNFTFSYTFEDVPFHSSYAHSQSLDRLMNPLIDQYLYYLNKTQSNSGTLQQSRLLFSQAGPTSMSLQAKNWLPGPCYRQQRLSKQANDNNNSNFPWTAATKYHLNGRDSLVNPGPAMASHKDDEEKFFPMHGTLIFGKQGTNANDADLDNVMITDEEEIRTTNPVATEQYGTVSNNLQNSNTGPTTGTVNHQGALPGMVWQDRDVYLQGPIWAKIPHTDGHFHPSPLMGGFGLKHPPPQIMIKNTPVPANPPTNFSSAKFASFITQYSTGQVSVEIEWELQKENSKRWNPEIQYTSNYNKSVNVDFTVDTNGVYSEPRPIGTRYLTRNL

SEQ ID NO: 1953 - protein, 735 aa, Artificial Sequence
  Synthetic Polypeptide
MAADGYLPDWLEDTLSEGIRQWWKLKPGPPPPKPAERHKDDSRGLVLPGYKYLGPFNGLDKGEPVNEADAAALEHDKAYDRQLDSGDNPYLKYNHADAEFQERLKEDTSFGGNLGRAVFQAKKRVLEPLGLVEEPVKTAPGKKRPVEHSPVEPDSSSGTGKAGQQPARKRLNFGQTGDADSVPDPQPLGQPPAAPTSLGSTTMATGSGAPMADNNEGADGVGNSSGNWHCDSQWLGDRVITTSTRTWALPTYNNHLYKQISSQSGASNDNHYFGYSTPWGYFDFNRFHCHFSPRDWQRLINNNWGFRPKRLNFKLFNIQVKEVTQNDGTTTIANNLTSTVQVFTDSEYQLPYVLGSAHQGCLPPFPADVFMVPQYGYLTLNNGSQAVGRSSFYCLEYFPSQMPRTGNNFTFSYTFEDVPFHSSYAHSQSLDRLMNPLIDQYLYYLNKTQSNSGTLQQSRLLFSQAGPTSMSLQAKNWLPGPCYRQQRLSKQANDNNNSNFPWTAATKYHLNGRDSLVNPGPAMASHKDDEEKFFPMHGTLIFGKQGTNANDADLDNVMITDEEEIRTTNPVATEQYGTVSNNLQNSNTGPTTGTVNHQGALPGMVWQDRDVYLQGPIWAKIPHTDGHFHPSPLMGGFGLKHPPPQIMIKNTPVPANPPTNFSSAKFASFITQYSTGQVSVEIEWELQKENSKRWNPEIQYTSNYNKSVNVDFTVDTNGVYSEPRPIGTRYLTRNL

SEQ ID NO: 1954 - protein, 735 aa, Artificial Sequence
  Synthetic Polypeptide
MAADGYLPDWLEDTLSEGIRQWWKLKPGPPPPKPAERHKDDSRGLVLPGYKYLGPFNGLDKGEPVNEADAAALEHDKAYDRQLDSGDNPYLKYNHADAEFQERLKEDTSFGGNLGRAVFQAKKRVLEPLGLVEEPVKTAPGKKRPVEHSPVEPDSSSGTGKAGQQPARKRLNFGQTGDADSVPDPQPLGQPPAAPTSLGSTTMATGSGAPMADNNEGADGVGNSSGNWHCDSQWLGDRVITTSTRTWALPTYNNHLYKQISSQSGASNDNHYFGYSTPWGYFDFNRFHCHFSPRDWQRLINNNWGFRPKRLNFKLFNIQVKEVTQNDGTTTIANNLTSTVQVFTDSEYQLPYVLGSAHQGCLPPFPADVFMVPQYGYLTLNNGSQAVGRSSFYCLEYFPSQMLRTGNNFTFSYTFEDVPFHSSYAHSQSLDRLMNPLIDQYLYYLNKTQSNSGTLQQSRLLFSQAGPTSMSLQAKNWLPGPCYRQQRLSKQANDNNNSNFPWTAATKYHLNGRDSLVNPGPAMASHKDDEEKFFPMHGTLIFGKQGTNANDADLDNVMITDEEEIRTTNPVATEQYGTVSNNLQNSNTGPTTGTVNHQGALPGMVWQDRDVYLQGPIWAKIPHTDGHFHPSPLMGGFGLKHPPPQIMIKNTPVPANPPTNFSSAKSASFITQYSTGQVSVEIEWELQKENSKRWNPEIQYTSNYNKSVNVDFTVDTNGVYSEPRPIGTRYLTRNL

SEQ ID NO: 1955 - protein, 735 aa, Artificial Sequence
  Synthetic Polypeptide
MAADGYLPDWLEDTLSEGIRQWWKLKPGPPPPKPAERHKDDSRGLVLPGYKYLGPFNGLDKGEPVNEADAAALEHDKAYDRQLDSGDNPYLKYNHADAEFQERLKEDTSFGGNLGRAVFQAKKRVLEPLGLVEEPVKTAPGKKRPVEHSPVEPDSSSGTGKAGQQPARKRLNFGQTGDADSVPDPQPLGQPPAAPTSLGSTTMATGSGAPMADNNEGADGVGNSSGNWHCDSQWLGDRVITTSTRTWALPTYNNHLYKQISSQSGASNDNHYFGHSTPWGYFDFNRFHCHFSPRDWQRLINNNWGFRPKRLNFKLFNIQVKEVTQNDGTTTIANNLTSTVQVFTDSEYQLPYVLGSAHQGCLPPFPADVFMVPQYGYLTLNNGSQAVGRSSFYCLEYFPSQMLRTGNNFTFSYTFEDAPFHSSYAHSQSLDRLMNPLIDQYLYYLNKTNNQSGTFTQSRLLFSQAGPTSILFKSKNWLPGPCYRQQRLSKTANDNNNSNFPWTAATKYHLNGRDSLVNPGPAMASHKDDEEKFFPQHGTLIFGKQGTKLTDADLDNVMITDEEEIRTTNPVATEQYGTVSNNLQKLNILATTGTVNTQGALPGMVWQDRDVYLQGPIWAKIPHTDGHFHPSPLMGGFGLKHPPPQIMIKNTPVPANPPTNFSSAKFASFITQYSTGQVSVEIEWELQKENSKRWNPEIQYTSNYNKSVNVDFTVDTNGVYSEPRPIGTRYLTRNL

SEQ ID NO: 1956 - protein, 735 aa, Artificial Sequence
  Synthetic Polypeptide
MAADGYLPDWLEDTLSEGIRQWWKLKPGPPPPKPAERHKDASRGLVLPGYKYLGPFNGLDKGEPVNEADAAALEHDKAYDRQLDSGDNPYLKYNHADAEFQERLKEDTSFGGNLGRAVFQAKKRVLEPLGLVEEPVKTAPGKKRPVEHSPVEPDSSSGTGKAGQQPARKRLNFGQTGDADSVPDPQPLGQPPAAPTSLGSTTMATGSGAPMADNNEGADGVGNSSGNWHCDSQWLGDRVITTSTRTWALPTYNNHLYKQISSQSGASNDNHYFGYSTPWGYFDFNRFHCHFSPRDWQRLINNNWGFRPKRLNFKLFNIQVKEVTQNDGTTTIANNLTSTVQVFTDSEYQLPYVLGSAHQGCLPPFPADVFMVPQYGYLTLNNGSQAVGRSSFYCLEYFPSQMLRTGNNFTFSYTFEDVPFHSSYAHSQSLDRLMNPLIDQYLYYLNKTNNQSGTFTQSRLLFSQAGPTSILFKSKNWLPGPCYRQQRLSKTANDNNNSNFPWTAATKYHLNGRDSLVNPGPAMASHKDDEEKFFPMHGTLIFGKQGTKLTDADLDNVMITDEEEIRTTNPVATEQYGTVSNNLQKLNILATTGTVNTQGALPGMVWQDRDVYLQGPIWAKIPHTDGHFHPSPLMGGFGLKHPPPQIMIKNTPVPANPPTNFSSAKFASFITQYSTGQVSVEIEWELQKENSKRWNPEIQYTSNYNKSVNVDFTVDTNGVYSEPRPIGTRYLTRNL

SEQ ID NO: 1957 - protein, 735 aa, Artificial Sequence
  Synthetic Polypeptide
MAADGYLPDWLEDTLSEGIRQWWKLKPGPPPPKPAERHKDDSRGLVLPGYKYLGPFNGLDKGEPVNEADAAALEHDKAYDRQLDSGDNPYLKYNHADAEFQERLKEDTSFGGNLGRAVFQAKKRVLEPLGLVEEPVKTAPGKKRPVEHSPVEPDSSSGTGKAGQQPARKRLNFGQTGDADSVPDPQPLGQPPAAPSGLGTNTMATGSGAPMADNNEGADGVGNSSGNWHCDSTWMGDRVITTSTRTWALPTYNNHLYKQISSQSGASNDNHYFGYSTPWGYFDFNRFHCHFSPRDWQRLINNNWGFRPKRLNFKLFNIQVKEVTQNDGTTTIANNLTSTVQVFTDSEYQLPYVLGSAHQGCLPPFPADVFMVPQYGYLTLNNGSQAVGRSSFYCLEYFPSQMLRTGNNFTFSYTFEDVPFHSSYAHSQSLDRLMNPLIDQYLYYLNKTNNQSGTFTQSRLLFSQAGPTSILFKSKNWLPGPCYRQQRLSKTANDNNNSNFPWTAATKYHLNGRDSLVNPGPAMASHKDDEEKFFPQHGTLIFGKQGTKLTDADLDNVMITDEEEIRTTNPVATEQYGTVSNNLQKLNILATTGTVNTQGALPGMVWQDRDVYLQGPIWAKIPHTDGHFHPSPLMGGFGLKHPPPQIMIKNTPVPANPPTNFSSAKFASFITQYSTGQVSVEIEWELQKENSKRWNPEIQYTSNYNKSVNVDFTVDTNGVYSEPRPIGTRYLTRNL

SEQ ID NO: 1958 - protein, 735 aa, Artificial Sequence
  Synthetic Polypeptide
MAADGYLPDWLEDTLSEGIRQWWKLKPGPPPPKPAERHKDDSRGLVLPGYKYLGPFNGLDKGEPVNEADAAALEHDKAYDRQLDSGDNPYLKYNHADAEFQERLKEDTSFGGNLGRAVFQAKKRVLEPLGLVEEPVKTAPGKKRPVEHSPVEPDSSSGTGKAGQQPARKRLNFGQTGDADSVPDPQPLGQPPAAPTSLGSTTMATGSGAPMADNNEGADGVGNSSGNWHCDSQWLGDRVITTSTRTWALPTYNNHLYKQISSQSGASNDNHYFGHSTPWGYFDFNRFHCHFSPRDWQRLINNNWGFRPKRLNFKLFNIQVKEVTQNDGTTTIANNLTSTVQVFTDSEYQLPYVLGSAHQGCLPPFPADVFMVPQYGYLTLNNGSQAVGRSSFYCLEYFPSQMLRTGNNFTFSYTFEDVPFHSSYAHSQSLDRLMNPLIDQYLYYLNKTNNQSGTFTQSRLLFSQAGPTSILFKSKNWLPGPCYRQQRLSKTANDNNNSNFPWTAATKYHLNGRDSLVNPGPAMASHKDDEEKFFPMHGTLIFGKQGTKLTDADLDNVMITDEEEIRTTNPVATEQYGTVSNNLQKLNILATTGTVNTQGALPGMVWQDRDVYLQGPIWAKIPHTDGHFHPSPLMGGFGLKHPPPQIMIKNTPVPANPPTNFSSAKFASFITQYSTGQVSVEIEWELQKENSKRWNPEIQYTSNYNKSVNVDFTVDTNGVYSEPRPIGTRYLTRNL

SEQ ID NO: 1959 - protein, 735 aa, Artificial Sequence
  Synthetic Polypeptide
MAADGYLPDWLEDTLSEGIRQWWKLKPGPPPPKPAERHKDDSRGLVLPGYKYLGPFNGLDKGEPVNEADAAALEHDKAYDRQLDSGDNPYLKYNHADAEFQERLKEDTSFGGNLGRAVFQAKKRVLEPLGLVEEPVKTAPGKKRPVEHSPVEPDSSSGTGKAGQQPARKRLNFGQTGDADSVPDPQPLGQPPAAPTSLGSTTMATGSGAPMADNNEGADGVGNSSGNWHCDSQWLGDRVITTSTRTWALPTYNNHLYKQISSQSGASNDNHYFGYSTPWGYFDFNRFHCHFSPRDWQRLINNNWGFRPKRLNFKLFNIQVKEVTQNDGTTTIANNLTSTVQVFTDSEYQLPYVLGSAHQGCLPPFPADVFMVPQYGYLTLNNGSQAVGRSSFYCLEYFPSQMLRTGNNFTFSYTFEDVPFHSSYAHSQSLDRLMNPLIDQYLYYLNKTNNQSGTFTQSRLLFSQAGPTSILFKSKNWLPGPCYRQQRLSKTANDNNNSNFPWTAATKYHLNGRDSLVNPGPAMASHKDDEEKFFPQHGTLIFGKQGTKLTDADLDNVMITDEEEIRTTNPVATEQYGTVSNNLQKLNILATTGTVNTQGALPGMVWQDRDVYLQGPIWAKIPHTDGHFHPSPLMGGFGLKHPPPQIMIKNTPVPANPPTNFSSAKFASFITQYSTGQVSVEIEWELQKENSKRWNPEIQYTSNYNKSVNVDFTVDTNGVYSEPRPIGTRYLTRNL

SEQ ID NO: 1960 - protein, 735 aa, Artificial Sequence
  Synthetic Polypeptide
MAADGYLPDWLEDTLSEGIRQWWKLKPGPPPPKPAERHKDASRGLVLPGYKYLGPFNGLDKGEPVNEADAAALEHDKAYDRQLDSGDNPYLKYNHADAEFQERLKEDTPFGGNLGRAVFQAKKRVLEPLGLVEEPVKTAPGKKRPVEHSPVEPDSSSGTGKAGQRPARKRLNFGQTGDADSVPDPQPLGQPPAAPTSLGSTTMATGSGAPMADNNEGADGVGNSSGNWHCDSQWLGDRVITTSTRTWALPTYNNHLYKQIPSQSGASNDNHYFGYSTPWGYFDFNRFHCHFSPRDWQRLINNNWGFRPKRLNFKLFNIQVKEVTQNDGTTTIANNLTSTVQVFTDSEYQLPYVLGSAHQGCLPPFPADVFMVPQYGYLTLNNGSQAVGRSSFYCLEYFPSQMLRTGNNFTFSYTFEDVPFHSSYAHSQSLDRLMNPLIDQYLYYLNKTNNQSGTFTQSRLLFSQAGPTSILFKSKNWLPGPCYRQQRLSKTANDNNNSNFPWTAATKYHLNGRDSLVNPGPAMASHKDDEEKFFPQHGTLIFGKQGTKLTDADLDNVMITDEEEIRTTNPVATEQYGTVSNNLQKLNILATTGTVNTQGALPGMVWQDRDVYLQGPIWAKIPHTDGHFHPSPLMGGFGLKHPPPQIMIKNTPVPANPPTNFSSAKFASFITQYSTGQVSVEIEWELQKENSKRWNPEIQYTSNYNKSVNVDFTVDTNGVYSEPRPIGTRYLTRNL

SEQ ID NO: 1961 - protein, 735 aa, Artificial Sequence
  Synthetic Polypeptide
MAADGYLPDWLEDTLSEGIRQWWKLKPGPPPPKPAERHKDDSRGLVLPGYKYLGPFNGLDKGEPVNEADAAALEHDKAYDRQLDSGDNPYLKYNHADAEFQERLKEDTSFGGNLGRAVFQAKKRVLEPLGLVEEPVKTAPGKKRPVEHSPVEPDSSSGTGKAGQQPARKRLNFGQTGDADSVPDPQPLGQPPAAPSGLGTNTMATGSGAPMADNNEGADGVGNSSGNWHCDSTWMGDRVITTSTRTWALPTYNNHLYKQISSQSGASNDNHYFGYSTPWGYFDFNRFHCHFSPRDWQRLINNNWGFRPKRLNFKLFNIQVKEVTQNDGTTTIANNLTSTVQVFTDSEYQLPYVLGSAHQGCLPPFPADVFMVPQYGYLTLNNGSQAVGRSSFYCLEYFPSQMLRTGNNFTFSYTFEDAPFHSSYAHSQSLDRLMNPLIDQYLYYLNKTNNQSGTFTQSRLLFSQAGPTSILFKSKNWLPGPCYRQQRLSKTANDNNNSNFPWTAATKYHLNGRDSLVNPGPAMASHKDDEEKFFPQHGTLIFGKQGTKLTDADLDNVMITDEEEIRTTNPVATEQYGTVSNNLQKLNILATTGTVNTQGALPGMVWQDRDVYLQGPIWAKIPHTDGHFHPSPLMGGFGLKHPPPQIMIKNTPVPANPPTNFSSAKFASFITQYSTGQVSVEIEWELQKENSKRWNPEIQYTSNYNKSVNVDFTVDTNGVYSEPRPIGTRYLTRNL

SEQ ID NO: 1962 - protein, 735 aa, Artificial Sequence
  Synthetic Polypeptide
MAADGYLPDWLEDILSEGIRQWWKLKPGPPPPKPAERHKDASRGLVLPGYKYLGPFNGLDKGEPVNEADAAALEHDKAYDRQLDSGDNPYLKYNHADAEFQERLKEDTSFGGNLGRAVFQAKKRVLEPLGLVEEPVKTAPGKKRPVEHSPVEPDSSSGTGKAGQQPARKRLNFGQTGDADSVPDPQPLGQPPAAPTSLGSTTMATGSGAPMADNNEGADGVGNSSGNWHCDSQWLGDRVITTSTRTWALPTYNNHLYKQISSQSGASNDNHYFGYSTPWGYFDFNRFHCHFSPRDWQRLINNNWGFRPKRLNFKLFNIQVKEVTQNDGTTTIANNLTSTVQVFTDSEYQLPYVLGSAHQGCLPPFPADVFMVPQYGYLTLNNGSQAVGRSSFYCLEYFPSQMLRTGNNFTFSYTFEDVPFHSSYAHSQSLDRLMNPLIDQYLYYLNKTNNQSGTFTQSRLLFSQAGPTSILFKSKNWLPGPCYRQQRLSKTANDNNNSNFPWTAATKYHLNGRDSLVNPGPAMASHKDDEEKFFPQHGTLIFGKQGTKLTDADLDNVMITDEEEIRTTNPVATEQYGTVSNNLQKLNILATTGTVNTQGALPGMVWQDRDVYLQGPIWAKIPHTDGHFHPSPLMGGFGLKHPPPQIMIKNTPVPANPPTNFSSAKFASFITQYSTGQVSVEIEWELQKENSKRWNPEIQYTSNYNKSVNVDFTVDTNGVYSEPRPIGTRYLTRNL

SEQ ID NO: 1963 - protein, 735 aa, Artificial Sequence
  Synthetic Polypeptide
MAADGYLPDWLEDILSEGIRQWWKLKPGPPPPKPAERHKDASRGLVLPGYKYLGPFNGLDKGEPVNEADAAALEHDKAYDRQLDSGDNPYLKYNHADAEFQERLKEDTSFGGNLGRAVFQAKKRVLEPLGLVEEPVKTAPGKKRPVEHSPVEPDSSSGTGKAGQQPARKRLNFGQTGDADSVPDPQPLGQPPAAPTSLGSTTMATGSGAPMADNNEGADGVGNSSGNWHCDSQWLGDRVIATSTRTWALPTYNNHLYKQISSQSGASNDNHYFGYSTPWGYFDFNRFHCHFSPRDWQRLINNNWGFRPKRLNFKLFNIQVKEVTQNDGTTTIANNLTSTVQVFTDSEYQLPYVLGSAHQGCLPPFPADVFMVPQYGYLTLNNGSQAVGRSSFYCLEYFPSQMLRTGNNFTFSYTFEDVPFHSSYAHSQSLDRLMNPLIDQYLYYLNKTNNQSGTFTQSRLLLSQAGPTSILFKSKNWLPGPCYRQQRLSKTANDNNNSNFPWTAATKYHLNGRDSLVNPGPAMASHKDDEEKFFPQHGTLIFGKQGTKLTDADLDNVMITDEEEIRTTNPVATEQYGTVSNNLQKLNILATTGTVNTQGALPGMVWQDRDVYLQGPIWAKIPHTDGHFHPSPLMGGFGLKHPPPQIMIKNTPVPANPPTNFSSAKFASFITQYSTGQVSVEIEWELQKENSKRWNPEIQYTSNYNKSVNVDFTVDTNGVYSEPRPIGTRYLTRNL

SEQ ID NO: 1964 - protein, 735 aa, Artificial Sequence
  Synthetic Polypeptide
MAADGYLPDWLEDTLSEGIRQWWKLKPGPPPPKPAERHKDASRGLVLPGYKYLGPFNGLDKGEPVNEADAAALEHDKAYDRQLDSGDNPYLKYNHADAEFQERLKEDTPFGGNLGRAVFQAKKRVLEPLGLVEEPVKTAPGKKRPVEHSPVEPDSSSGTGKAGQQPARKRLNFGQTGDADSVPDPQPLGQPPAAPTSLGSTTMATGSGAPMADNNEGADGVGNSSGNWHCDSQWLGDRVITTSTRTWALPTYNNHLYKQIPSQSGASNDNHYFGYSTPWGYFDFNRFHCHFSPRDWQRLINNNWGFRPKRLNFKLFNIQVKEVTQNDGTTTIANNLTSTVQVFTDSEYQLPYVLGSAHQGCLPPFPADVFMVPQYGYLTLNNGSQAVGRSSFYCLEYFPSQMLRTGNNFTFSYTFEDVPFHSSYAHSQSLDRLMNPLIDQYLYYLNKTNNQSGTFTQSRLLFSQAGPTSILFKSKNWLPGPCYRQQRLSKTANDNNNSNFPWTAATKYHLNGRDSLVNPGPAMASHKDDEEKFFPQHGTLIFGKQGTKLTDADLDNVMITDEEEIRTTNPVATEQYGTVSNNLQKLNILATTGTVNTQGALPGMVWQDRDVYLQGPIWAKIPHTDGHFHPSPLMGGFGLKHPPPQIMIKNTPVPANPPTNFSSAKFASFITQYSTGQVSVEIEWELQKENSKRWNPEIQYTSNYNKSVNVDFTVDTNGVYSEPRPIGTRYLTRNL

SEQ ID NO: 1965 - protein, 735 aa, Artificial Sequence
  Synthetic Polypeptide
  misc_feature (172)..(172): Xaa can be any naturally occurring amino acid
  misc_feature (220)..(220): Xaa can be any naturally occurring amino acid
  misc_feature (367)..(367): Xaa can be any naturally occurring amino acid
  misc_feature (499)..(499): Xaa can be any naturally occurring amino acid
  misc_feature (558)..(558): Xaa can be any naturally occurring amino acid
  misc_feature (590)..(590): Xaa can be any naturally occurring amino acid
  misc_feature (597)..(597): Xaa can be any naturally occurring amino acid
MAADGYLPDWLEDTLSEGIRQWWKLKPGPPPPKPAERHKDDSRGLVLPGYKYLGPFNGLDKGEPVNEADAAALEHDKAYDRQLDSGDNPYLKYNHADAEFQERLKEDTSFGGNLGRAVFQAKKRVLEPLGLVEEPVKTAPGKKRPVEHSPVEPDSSSGTGKAGQQPARKRLXFGQTGDADSVPDPQPLGQPPAAPSGLGTNTMATGSGAPMADNNEGADXVGNSSGNWHCDSTWMGDRVITTSTRTWALPTYNNHLYKQISSQSGASNDNHYFGYSTPWGYFDFNRFHCHFSPRDWQRLINNNWGFRPKRLNFKLFNIQVKEVTQNDGTTTIANNLTSTVQVFTDSEYQLPYVLGSAHQGCLPPFPXDVFMVPQYGYLTLNNGSQAVGRSSFYCLEYFPSQMLRTGNNFTFSYTFEDVPFHSSYAHSQSLDRLMNPLIDQYLYYLNKTNNQSGTFTQSRLLFSQAGPTSILFKSKNWLPGPCYRQQRLSKTANDNNNSXFPWTAATKYHLNGRDSLVNPGPAMASHKDDEEKFFPMHGTLIFGKQGTKLTDADLDNVXITDEEEIRTTNPVATEQYGTVSNNLQKLNILXTTGTVNXQGALPGMVWQDRDVYLQGPIWAKIPHTDGHFHPSPLMGGFGLKHPPPQIMIKNTPVPANPPTNFSYAKFASFITQYSTGQVSVEMEWELQKENSKRWNPEIPYTSKYNKSVNVDFTVDTNGVYSEPRPIGTRYLTRNL

SEQ ID NO: 1966 - protein, 735 aa, Artificial Sequence
  Synthetic Polypeptide
MAADGYLPDWLEDTLSEGIRQWWKLKPGPPPPKPAERHQDDSRGLVLPGYKYLGPFNGLDKGEPVNEADAAALEHDKAYDRQLDSGDNPYLKYNHADAEFQERLKEDTSFGGNLGRAVFQAKKRVLEPLGLVEEPVKTAPGKKRPVEHSPAEPDSSSGTGKAGQQPARKRLNFGQTGDADSVPDPQPLGQPPAAPTSLGSTTMATGSGAPMADNNEGADGVGNSSGNWHCDSQWLGDRVITTSTRTWALPTYNNHLYKQISSQSGASNDNHYFGYSTPWGYFDFNRFHCHFSPRDWQRLINNNWGFRPKRLNFKLFNIQVKEVTQNDGTTTIANNLTSTVQVFTDSEYQLPYVLGSAHQGCLPPFPADVFMVPQYGYLTLNNGSQAVGRSSFYCLEYFPSQMLRTGNNFTFSYTFEDVPFHSSYAHSQSLDRLMNPLIDQYLYYLNRTQSNSGTLQQSRLLFSQAGPTSMSLQAKNWLPGPCYRQQRLSKQANDNNNSNFPWTAATKYHLNGRDSLVNPGPAMASHKDDEEKFFPMHGTLIFGKQGTNANDADLEHVMITDEEEIRTTNPVATEQYGNVSNNLQNSNTGPTTENVNHQGALPGMVWQDRDVYLQGPIWAKIPHTDGHFHPSPLMGGFGLKHPPPQIMIKNTPVPANPPTNFSAAKFASFITQYSTGQASVEIEWELQKENSKRWNPEIQYTSNYNKSVNVDFTVDTNGVYSEPRPIGTRYLTRNL

SEQ ID NO: 1967 - protein, 735 aa, Artificial Sequence
  Synthetic Polypeptide
MAADGYLPDWLEDTLSEGIRQWWKLKPGPPPPKPAERHKDDSRGLVLPGYKYLGPFNGLDKGEPVNEADAAALEHDKAYDRQLDSGDNPYLKYNHADAEFQERLKEDTSFGGNLGRAVFQAKKRVLEPLGLVEEPVKTAPGKKRPVEHSPVEPDSSSGTGKAGQQPARKRLNFGQTGDADSVPDPQPLGQPPAAPTSLGSTTMATGSGAPMADNNEGADGVGNSSGNWHCDSQWLGDRVITTSTRTWALPTYNNHLYKQISSQSGASNDNHYFGHSTPWGYFDFNRFHCHFSPRDWQRLINNNWGFRPKRLNFKLFNIQVKEVTQNDGTTTIANNLTSTVQVFTDSEYQLPYVLGSAHQGCLPPFPADVFMVPQYGYLTLNNGSQAVGRSSFYCLEYFPSQMLRTGNNFTFSYTFEDVPFHSSYAHSQSLDRLMNPLIDQYLYYLNKTQSNSGTLQQSRLLFSQAGPTSMPLQAKNWLPGPCYRQQRLSKQANDNNNSNFPWTAATKYHLNGRDSLVNPGPAMASHKDDEEKFFPMHGTLIFGKQGTNANDADLDNVMITDEEEIRTTNPVATEQYGTVSNNLQNSNTGPTTGTVNHQGALPGMVWQDRDVYLQGPIWAKIPHTDGHFHPSPLMGGFGLKHPPPQIMIKNTPVPANPPTNFSSAKFASFITQYSTGQVSVEIEWELQKENSKRWNPEIQYTSNYNKSVNVDFTVDTNGVYSEPRPIGTRYLTRNL

SEQ ID NO: 1968 - protein, 735 aa, Artificial Sequence
  Synthetic Polypeptide
MAADGYLPDWLEDTLSEGIRQWWKLKPGPPPPKPAERHKDDSRGLVLPGYKYLGPFNGLDKGEPVNEADAAALEHDKAYDRQLDSGDNPYLKYNHADAEFQERLKEDTSFGGNLGRAVFQAKKRVLEPLGLVEEPVKTAPGKKRPVEHSPVEPDSSSGTGKAGQQPARKRLNFGQTGDADSVPDPQPLGQPPAAPTSLGSTTMATGSGAPMADNNEGADGVGNSSGNWHCDSQWLGDRVITTSTRTWALPTYNNHLYKQISSQSGASNDNHYFGHSTPWGYFDFNRFHCHFSPRDWQRLINNNWGFRPKRLNFKLFNIQVKEVTQNDGTTTIANNLTSTVQVFTDSEYQLPYVLGSAHQGCLPPFPADVFMVPQYGYLTLNNGSQAVGRSSFYCLEYFPSQMLRTGNNFTFSYTFEDVPFHSSYAHSQSLDRLMNPLIDQYLYYLNKTQSNSGTLQQSRLLFSQAGPTSMSLQAKNWLPGPCYRQQRLSKQANDNNNSNFPWTAATKYHLNGRDSLVNPGPAMASHKDDEEKFFPMHGTLIFGKQGTNANDADLDNVMITDEEEIRTTNPVATEQYGTVSNNLQNSNTGPTTGTANHQGALPGMVWQDRDVYLQGPIWAKIPHTDGHFHPSPLMGGFGLKHPPPQIMIKNTPVPANPPTNFSSAKFASFITQYSTGQVSVEIEWELQKENSKRWNPEIQYTSNYNKSVNVDFTVDTNGVYSEPRPIGTRYLTRNL

SEQ ID NO: 1969 - protein, 735 aa, Artificial Sequence
  Synthetic Polypeptide
MAADGYLPDWLEDTLSEGIRQWWKLKPGPPPPKPAERHKDDSRGLVLPGYKYLGPFNGLDKGEPVNEADAAALEHDKAYDRQLDSGDNPYLKYNHADAEFQERLKEDTSFGGNLGRAVFQAKKRVLEPLGLVEEPVKTAPGKKRPVEHSPVEPDSSSGTGKAGQQPARKRLNFGQTGDAGSVPDPQPLGQPPAAPTSLGSTTMATGSGAPMADNNEGADGVGNSSGNWHCDSQWLGDRVITTSTRTWALPTYNNHLYKQISSQSGASNDNHYFGHSTPWGYFDFNRFHCHFSPRDWQRLINNNWGFRPKRLNFKLFNIQVKEVTQNDGTTTIANNLTSTVQVFTDSEYQLPYVLGSAHQGCLPPFPADVFMVPQYGYLTLNNGSQAVGRSSFYCLEYFPSQMLRTGNNFTFSYTFEDVPFHSSYAHSQSLDRLMNPLIDQYLYYLNKTQSNSGTLQQSRLLFSQAGPTSMSLQAKNWLPGPCYRQQRLSKQANDNNNSNFPWTAATKYHLNGRDSLVNPGPAMASHKDDEEKFFPMHGTLIFGKQGTNANDADLDNVMITDEEEIRTTNPVATEQYGTVSNNLQNSNTGPTTGTVNHQGALPGMVWQDRDVYLQGPIWAKIPHTDGHFHPSPLMGGFGLKHPPPQIMIKNTPVPANPPTNFSSAKFASFITQYSTGQVSVEIEWELQKENSKRWNPEIQYTSNYNKSVNVDFTVDTNGVYSEPRPIGTRYLTRNL

SEQ ID NO: 1970 - protein, 735 aa, Artificial Sequence
  Synthetic Polypeptide
MAADGYLPDWLEDTLSEGIRQWWKLKPGPPPPKPAERHKDDSRGLVLPGYKYLGPFNGLDKGEPVNEADAAALEHDKAYDRQLDSGDNPYLKYNHADAEFQERLKEDTSFGGNLGRAVFQAKKRVLEPLGLVEEPVKTAPGKKRPVEHSPVEPDSSSGTGKAGQQPARKRLNFGQTGDADSVPDPQPLGQPPAAPTSLGSTTMATGSGAPMADNNEGADGVGNSSGNWHCDSQWLDDRVITTSTRTWALPTYNNHLYKQISSQSGASNDNHYFGHSTPWGYFDFNRFHCHFSPRDWQRLINNNWGFRPKRLNFKLFNIQVKEVTQNDGTTTIANNLTSTVQVFTDSEYQLPYVLGSAHQGCLPPFPADVFMVPQYGYLTLNNGSQAVGRSSFYCLEYFPSQMLRTGNNFTFSYTFEDVPFHSSYAHSQSLDRLMNPLIDQYLYYLNKTQSNSGTLQQSRLLFSQAGPTSMSLQAKNWLPGPCYRQQRLSKQANDNNNSNFPWTAATKYHLNGRDSLVNPGPAMASHKDDEEKFFPMHGTLIFGKQGTNANDADLDNVMITDEEEIRTTNPVATEQYGTVSNNLQNSNTGPTTGTVNHQGALPGMVWQDRDVYLQGPIWAKIPHTDGHFHPSPLMGGFGLKHPPPQIMIKNTPVPANPPTNFSSAKFASFITQYSTGQVSVEIEWELQKENSKRWNPEIQYTSNYNKSVNVDFTVDTNGVYSEPRPIGTRYLTRNL

SEQ ID NO: 1971 - protein, 735 aa, Artificial Sequence
  Synthetic Polypeptide
MAADGYLPDWLEDTLSEGIRQWWKLKPGPPPPKPAERHKDDSRGLVLPGYKYLGPFNGLDKGEPVNEADAAALEHDKAYDRQLDSGDNPYLKYNHADAEFQERLKEDTSFGGNLGRAVFQAKKRVLEPLGLVEEPVKTAPGKKRPVEHSPVEPGSSSGTGKAGQQPARKRLNFGQTGDADSVPDPQPLGQPPAAPTSLGSTTMATGSGAPMADNNEGADGVGNSSGNWHCDSQWLGDRVITTSTRTWALPTYNNHLYKQISSQSGASNDNHYFGHSTPWGYFDFNRFHCHFSPRDWQRLINNNWGFRPKRLNFKLFNIQVKEVTQNDGTTTIANNLTSTVQVFTDSEYQLPYVLGSAHQGCLPPFPADVFMVPQYGYLTLNNGSQAVGRSSFYCLEYFPSQMLRTGNNFTFSYTFEDVPFHSSYAHSQSLDRLMNPLIDQYLYYLNKTQSNSGTLQQSRLLFSQAGPTSMSLQAKNWLPGPCYRQQRLSKQANDNNNSNFPWTAATKYHLNGRDSLVNPGPAMASHKDDEEKFFPMHGTLIFGKQGTNANDADLDNVMITDEEEIRTTNPVATEQYGTVSNNLQNSNTGPTTGTVNHQGALPGMVWQDRDVYLQGPIWAKIPHTDGHFHPSPLMGGFGLKHPPPQIMIKNTPVPANPPTNFSSAKFASFITQYSTGQVSVEIEWELQKENSKRWNPEIQYTSNYNKSVNVDFTVDTNGVYSEPRPIGTRYLTRNL

SEQ ID NO: 1972 - protein, 735 aa, Artificial Sequence
  Synthetic Polypeptide
MAADGYLPDWLEDTLSEGIRQWWKLKPGPPPPKPAERHKDDSRGLVLPGYKYLGPFNGLDKGEPVNEADAAALEHDKAYDRQLDSGDNPYLKYNHADAEFQERLKEDTSFGGNLGRAVFQAKKRVLEPLGLVEEPVKTAPGKKRPVEHSPVEPDSSSGTGKAGQQPARKRLNFGQTGDADSVPDPQPLGQPPAAPTSLGSTTMATGSGAPMADNNEGADGVGNSSGNWHCDSQWLGDRVITTSTRTWALPTYNNHLYKQISSQSGASNDNHYFGHSTPWGYFDFNRFHCHFSPRDWQRLINNNWGFRPKRLNFKLFNIQVKEVTQNDGTTTIANNLTSTVQVFTDSEYQLPYVLGSAHQGCLPPFPADVFMVPQYGYLTLNNGSQAVGRSSFYCLEYFPSQMLRTGNNFTFSYTFEDVPFHSSYAHSQSLDRLMNPLIDQYLYYLNKTQSNSGTLQQSRLLFSQAGPTSMSLQAKNWLPGPCYRQQRLSKQANDNNNSNFPWTAATKYHLNGRDSLVNPGPAMASHKDDEEKFFPMHGTLIFGKQGTNANDADLDNVMITDEEEIRTTNPVATEQYGTVSNNLQNSNTGPTTGTVNHQGALPGMVWQDRDVYLQGPIWAKIPHTDGHFHPSPLMGGFGLKHPPPQIMIKNTPVPANPPTNFSSAKFASFITQYSTGQVSVEIGWELQKENSKRWNPEIQYTSNYNKSVNVDFTVDTNGVYSEPRPIGTRYLTRNL

SEQ ID NO: 1973 - protein, 735 aa, Artificial Sequence
  Synthetic Polypeptide
MAADGYLPDWLEDTLSEGIRQWWKLKPGPPPPKPAERHKDDSRGLVLPGYKYLGPFNGLDKGEPVNEADAAALEHDKAYDRQLDSGDNPYLKYNHADAEFQERLKEDTSFGGNLGRAVFQAKKRVLEPLGLVEEPVKTAPGKKRPVEHSPVEPDSSSGTGKAGQQPARKRLNFGQTGDADSVPDPQPLGQPPAAPTSLGSTTMATGSGAPMADNNEGADGVGNSSGNWHCDSQWLGDRVITTSTRTWALPTYNNHLYKQISSQSGASNDNHYFGHSTPWGYFDFNRFHCHFSPRDWQRLINNNWGFRPKRLNFKLFNIQVKEVTQNDGTTTIANNLTSTVQVFTDSEYQLPYVLGSAHQGCLPPFPADVFMVPQYGYLTLNNGSQAVGRSSFYCLEYFPSQMLRTGNNFTFSYTFEDVPFHSSYAHSQSLDRLMNPLIDRYLYYLNKTQSNSGTLQQSRLLFSQAGPTSMSLQAKNWLPGPCYRQQRLSKQANDNNNSNFPWTAATKYHLNGRDSLVNPGPAMASHKDDEEKFFPMHGTLIFGKQGTNANDADLDNVMITDEEEIRTTNPVATEQYGTVSNNLQNSNTGPTTGTVNHQGALPGMVWQDRDVYLQGPIWAKIPHTDGHFHPSPLMGGFGLKHPPPQIMIKNTPVPANPPTNFSSAKFASFITQYSTGQVSVEIEWELQKENSKRWNPEIQYTSNYNKSVNVDFTVDTNGVYSEPRPIGTRYLTRNL

SEQ ID NO: 1974 - protein, 735 aa, Artificial Sequence
  Synthetic Polypeptide
MAADGYLPDWLEDTLSEGIRQWWKLKPGPPPPKPAERHKDDSRGLVLPGYKYLGPFNGLDKGEPVNEADAAALEHDKAYDRQLDSGDNPYLKYNHADAEFQERLKEDTSFGGNLGRAVFQAKKRVLEPLGLVEEPVKTAPGKKRPVEHSPVEPDSSSGTGKAGQQPARKRLNFGQTGDADSVPDPQPLGQPPAAPTSLGSTTMATGSGAPMADNNEGADGVGNSSGNWHCDSQWLGDRVITTSTRTWALPTYNNHLYKQISSQSGASNDNHYFGHSTPWGYFDFNRFHCHFSPRDWQRLINNNWGFRPKRLNFKLFNIQVKEVTQNDGTTTIANNLTSTVQVFTDSEYQLPYVLGSAHQGCLPPFPADVFMVPQYGYLTLNNGSQAVGRSSFYCLEYFPSQMLRTGNNFTFSYTFEDVPFHSSYAHSQSLDRLMNPLIDQHLYYLNKTQSNSGTLQQSRLLFSQAGPTSMSLQAKNWLPGPCYRQQRLSKQANDNNNSNFPWTAATKYHLNGRDSLVNPGPAMASHKDDEEKFFPMHGTLIFGKQGTNANDADLDNVMITDEEEIRTTNPVATEQYGTVSNNLQNSNTGPTTGTVNHQGALPGMVWQDRDVYLQGPIWAKIPHTDGHFHPSPLMGGFGLKHPPPQIMIKNTPVPANPPTNFSSAKFASFITQYSTGQVSVEIEWELQKENSKRWNPEIQYTSNYNKSVNVDFTVDTNGVYSEPRPIGTRYLTRNL

SEQ ID NO: 1975 - protein, 735 aa, Artificial Sequence
  Synthetic Polypeptide
MAADGYLPDWLEDTLSEGIRQWWKLKPGPPPPKPAERHKDDSRGPVLPGYKYLGPFNGLDKGEPVNEADAAALEHDKAYDRQLDSGDNPYLKYNHADAEFQERLKEDTSFGGNLGRAVFQAKKRVLEPLGLVEEPVKTAPGKKRPVEHSPVEPDSSSGTGKAGQQPARKRLNFGQTGDADSVPDPQPLGQPPAAPTSLGSTTMATGSGAPMADNNEGADGVGNSSGNWHCDSQWLGDRVITTSTRTWALPTYNNHLYKQISSQSGASNDNHYFGHSTPWGYFDFNRFHCHFSPRDWQRLINNNWGFRPKRLNFKLFNIQVKEVTQNDGTTTIANNLTSTVQVFTDSEYQLPYVLGSAHQGCLPPFPADVFMVPQYGYLTLNNGSQAVGRSSFYCLEYFPSQMLRTGNNFTFSYTFEDVPFHSSYAHSQSLDRLMNPLIDQYLYYLNKTQSNSGTLQQSRLLFSQAGPTSMSLQAKNWLPGPCYRQQRLSKQANDNNNSNFPWTAATKYHLNGRDSLVNPGPAMASHKDDEEKFFPMHGTLIFGKQGTNANDADLDNVMITDEEEIRTTNPVATEQYGTVSNNLQNSNTGPTTGTVNHQGALPGMVWQDRDVYLQGPIWAKIPHTDGHFHPSPLMGGFGLKHPPPQIMIKNTPVPANPPTNFSSAKFASFITQYSTGQVSVEIEWELQKENSKRWNPEIQYTSNYNKSVNVDFTVDTNGVYSEPRPIGTRYLTRNL

SEQ ID NO: 1976 - protein, 735 aa, Artificial Sequence
  Synthetic Polypeptide
MAADGYLPDWLEDTLSEGIRQWWKLKPGPPPPKPAERHKDDSRGLVLPGYKYLGPFNGLDKGEPVNEAGAAALEHDKAYDRQLDSGDNPYLKYNHADAEFQERLKEDTSFGGNLGRAVFQAKKRVLEPLGLVEEPVKTAPGKKRPVEHSPVEPDSSSGTGKAGQQPARKRLNFGQTGDADSVPDPQPLGQPPAAPTSLGSTTMATGSGAPMADNNEGADGVGNSSGNWHCDSQWLGDRVITTSTRTWALPTYNNHLYKQISSQSGASNDNHYFGHSTPWGYFDFNRFHCHFSPRDWQRLINNNWGFRPKRLNFKLFNIQVKEVTQNDGTTTIANNLTSTVQVFTDSEYQLPYVLGSAHQGCLPPFPADVFMVPQYGYLTLNNGSQAVGRSSFYCLEYFPSQMLRTGNNFTFSYTFEDVPFHSSYAHSQSLDRLMNPLIDQYLYYLNKTQSNSGTLQQSRLLFSQAGPTSMSLQAKNWLPGPCYRQQRLSKQANDNNNSNFPWTAATKYHLNGRDSLVNPGPAMASHKDDEEKFFPMHGTLIFGKQGTNANDADLDNVMITDEEEIRTTNPVATEQYGTVSNNLQNSNTGPTTGTVNHQGALPGMVWQDRDVYLQGPIWAKIPHTDGHFHPSPLMGGFGLKHPPPQIMIKNTPVPANPPTNFSSAKFASFITQYSTGQVSVEIEWELQKENSKRWNPEIQYTSNYNKSVNVDFTVDTNGVYSEPRPIGTRYLTRNL

SEQ ID NO: 1977 - protein, 735 aa, Artificial Sequence
  Synthetic Polypeptide
MAADGYLPDWLEDTLSEGIRQWWKLKPGPPPPKPAERHKDDSRGLVLPGYKYLGPFNGLDKGEPVNGADAAALEHDKAYDRQLDSGDNPYLKYNHADAEFQERLKEDTSFGGNLGRAVFQAKKRVLEPLGLVEEPVKTAPGKKRPVEHSPVEPDSSSGTGKAGQQPARKRLNFGQTGDADSVPDPQPLGQPPAAPTSLGSTTMATGSGAPMADNNEGADGVGNSSGNWHCDSQWLGDRVITTSTRTWALPTYNNHLYKQISSQSGASNDNHYFGHSTPWGYFDFNRFHCHFSPRDWQRLINNNWGFRPKRLNFKLFNIQVKEVTQNDGTTTIANNLTSTVQVFTDSEYQLPYVLGSAHQGCLPPFPADVFMVPQYGYLTLNNGSQAVGRSSFYCLEYFPSQMLRTGNNFTFSYTFEDVPFHSSYAHSQSLDRLMNPLIDQYLYYLNKTQSNSGTLQQSRLLFSQAGPTSMSLQAKNWLPGPCYRQQRLSKQANDNNNSNFPWTAATKYHLNGRDSLVNPGPAMASHKDDEEKFFPMHGTLIFGKQGTNANDADLDNVMITDEEEIRTTNPVATEQYGTVSNNLQNSNTGPTTGTVNHQGALPGMVWQDRDVYLQGPIWAKIPHTDGHFHPSPLMGGFGLKHPPPQIMIKNTPVPANPPTNFSSAKFASFITQYSTGQVSVEIEWELQKENSKRWNPEIQYTSNYNKSVNVDFTVDTNGVYSEPRPIGTRYLTRNL

SEQ ID NO: 1978 - protein, 735 aa, Artificial Sequence
  Synthetic Polypeptide
MAADGYLPDWLEDTLSEGIRQWWKLKPGPPPPKPAERHKDDSRGLVLPGYKYLGPFNGLDKGEPVNEADAAALEHDKAYDRQLDSGDNPYLKYNHADAEFQERLKEDTSFGGNLGRAVFQAKKRVLEPLGLVEEPVKTAPGKKRPVEHSPVEPDSSSGTGKAGQQPARKRLNFGQTGDADSVPDPQPLGQPPAAPTSLGSTTMATGSGAPMADNNEGADGVGNSSGNWHCDSQWLGDRVITTSTRTWALPTYNNHLYKQISSQSGASNDNHYFGHSTPWGYFDFNRFHCHFSPRDWQRLINNNWGFRPKRLNFKLFNIQVKEVTQNDGTTTIANNLTSTVQVFTDSEYQLPYVLGSAHQGCLPPFPADVFMVPQYGYLTLNNGSQAVGRSSLYCLEYFPSQMLRTGNNFTFSYTFEDVPFHSSYAHSQSLDRLMNPLIDQYLYYLNKTQSNSGTLQQSRLLFSQAGPTSMSLQAKNWLPGPCYRQQRLSKQANDNNNSNFPWTAATKYHLNGRDSLVNPGPAMASHKDDEEKFFPMHGTLIFGKQGTNANDADLDNVMITDEEEIRTTNPVATEQYGTVSNNLQNSNTGPTTGTVNHQGALPGMVWQDRDVYLQGPIWAKIPHTDGHFHPSPLMGGFGLKHPPPQIMIKNTPVPANPPTNFSSAKFASFITQYSTGQVSVEIEWELQKENSKRWNPEIQYTSNYNKSVNVDFTVDTNGVYSEPRPIGTRYLTRNL

SEQ ID NO: 1979 - protein, 735 aa, Artificial Sequence
  Synthetic Polypeptide
MAADGYLPDWLEDTLSEGIRQWWKLKPGPPPPKPAERHKDDSRGLVLPGYKYLGPFNGLDKGEPVNEADAAALEHDKAYDRQLDSGDNPYLKYNHADAEFQERLKEDTSFGGNLGRAVFQAKKRVLEPLGLVEEPVKTAPGKKRPVEHSPVEPDSSSGTGKAGQQPARKRLNFGQTGDADSVPDPQPLGQPPAAPTSLGSTTMATGSGAPMADNNEGADGVGNSSGNWHCDSQWLGDRVITTSTRTWALPTYNNHLYKQISSQSGASNDNHYFGHSTPWGYFDFNRFHCHFSPRDWQRLINNNWGFRPKRLNFKLFNIQVKEVTQNDGTTTIANNLTSTVQVFTDSEYQLPYVLGSAHQGCLPPFPADVFMVPQYGYLTLNNGSQAVGRSSFYCLEYFPSQMLRTGNNFTSSYTFEDVPFHSSYAHSQSLDRLMNPLIDQYLYYLNKTQSNSGTLQQSRLLFSQAGPTSMSLQAKNWLPGPCYRQQRLSKQANDNNNSNFPWTAATKYHLNGRDSLVNPGPAMASHKDDEEKFFPMHGTLIFGKQGTNANDADLDNVMITDEEEIRTTNPVATEQYGTVSNNLQNSNTGPTTGTVNHQGALPGMVWQDRDVYLQGPIWAKIPHTDGHFHPSPLMGGFGLKHPPPQIMIKNTPVPANPPTNFSSAKFASFITQYSTGQVSVEIEWELQKENSKRWNPEIQYTSNYNKSVNVDFTVDTNGVYSEPRPIGTRYLTRNL

SEQ ID NO: 1980 - protein, 735 aa, Artificial Sequence
  Synthetic Polypeptide
MAADGYLPDWLEDTLSEGIRQWWKLKPGPPPPKPAERHKDDSRGLVLPGYKYLGPFNGLDKGEPVNEADAAALEHDKAYDRQLDSGDNPYLKYNHADAEFQERLKEDTSFGGNLGRAVFQAKKRVLEPLGLVEEPVKTAPGKKRPVEHSPVEPDSSSGTGKAGQQPARKRLNFGQTGDADSVPDPQPLGQPPAAPTSLGSTTMATGSGAPMADNNEGADGVGNSSGNWHCDSQWLGDGVITTSTRTWALPTYNNHLYKQISSQSGASNDNHYFGHSTPWGYFDFNRFHCHFSPRDWQRLINNNWGFRPKRLNFKLFNIQVKEVTQNDGTTTIANNLTSTVQVFTDSEYQLPYVLGSAHQGCLPPFPADVFMVPQYGYLTLNNGSQAVGRSSFYCLEYFPSQMLRTGNNFTFSYTFEDVPFHSSYAHSQSLDRLMNPLIDQYLYYLNKTQSNSGTLQQSRLLFSQAGPTSMSLQAKNWLPGPCYRQQRLSKQANDNNNSNFPWTAATKYHLNGRDSLVNPGPAMASHKDDEEKFFPMHGTLIFGKQGTNANDADLDNVMITDEEEIRTTNPVATEQYGTVSNNLQNSNTGPTTGTVNHQGALPGMVWQDRDVYLQGPIWAKIPHTDGHFHPSPLMGGFGLKHPPPQIMIKNTPVPANPPTNFSSAKFASFITQYSTGQVSVEIEWELQKENSKRWNPEIQYTSNYNKSVNVDFTVDTNGVYSEPRPIGTRYLTRNL

SEQ ID NO: 1981 - protein, 735 aa, Artificial Sequence
  Synthetic Polypeptide
MAADGYLPDWLEDTLSEGIRQWWKLKPGPPPPKPAERHKDDSRGLVLPGYKYLGPFNGLDKGEPVNEADAAALEHDKAYDRQLDSGDNPYLKYNHADAEFQERLKEDTSFGGNLGRAVFQAKKRVLEPLGLVEEPVKTAPGKKRPVEHSPVEPDSSSGTGKAGQQPARKRLNFGQTGDADSVPDPQPLGQPPAAPTSLGSTTMATGSGAPMADNNEGADGVGNSSGNWHCDSQWLGDRVITTSTRTWALPTYNNHLYKQISSQSGASNDNHYFGHSTPWGYFDFNRFHCHFSPRDWQRLINNNWGFRPKRLNFKLFNIQVKEVTQNDGTTTIANNLTSTVQVFTDSEYQLPYVLGSAHQGCLPPFPADVFMVPQYGYLTLNNGSQAVGRSSFYCLEYFPSQMLRTGNNFTFSYTFEDVPFHSSYAHSQSLDRLMNPLIDQYLYYLNKTQSNSGTLQQSRLLFSQAGPTSMSLQAKNWLPGPCYRQQRLSKQANDNNNSNFPWTAATKYHLNGRDSLVNPGPAMASHKDDEEKFFPMHGTLIFGKQGTNANDADLDNVMITDEEEIRTTNPVATEQYRTVSNNLQNSNTGPTTGTVNHQGALPGMVWQDRDVYLQGPIWAKIPHTDGHFHPSPLMGGFGLKHPPPQIMIKNTPVPANPPTNFSSAKFASFITQYSTGQVSVEIEWELQKENSKRWNPEIQYTSNYNKSVNVDFTVDTNGVYSEPRPIGTRYLTRNL

SEQ ID NO: 1982 - protein, 735 aa, Artificial Sequence
  Synthetic Polypeptide
MAADGYLPDWLEDTLSEGIRQWWKLKPGPPPPKPAERHKDDSRGLVLPGYKYLGPFNGLDKGEPVNEADAAALEHDKAYDRQLDSGDNPYLKYNHADAEFQERLKEDTSFGGNLGRAVFQAKKRVLEPLGLVEEPVKTAPGKKRPVEHSPVEPDSSSGTGKAGQQPARKRLNFGQTGDADSVPDPQPLGQPPAAPTSLGSTTMATGSGAPMADNNEGADGVGNSSGNWHCDSQWLGDRVITTSTRTWALPTYNNHLYKQISSQSGASNDNHYFGHSTPWGYFDFNRFHCHFSPRDWQRLINNNWGFRPKRLNFKLFNIQVKEVTQNDGTTTIANNLTSTVRVFTDSEYQLPYVLGSAHQGCLPPFPADVFMVPQYGYLTLNNGSQAVGRSSFYCLEYFPSQMLRTGNNFTFSYTFEDVPFHSSYAHSQSLDRLMNPLIDQYLYYLNKTQSNSGTLQQSRLLFSQAGPTSMSLQAKNWLPGPCYRQQRLSKQANDNNNSNFPWTAATKYHLNGRDSLVNPGPAMASHKDDEEKFFPMHGTLIFGKQGTNANDADLDNVMITDEEEIRTTNPVATEQYGTVSNNLQNSNTGPTTGTVNHQGALPGMVWQDRDVYLQGPIWAKIPHTDGHFHPSPLMGGFGLKHPPPQIMIKNTPVPANPPTNFSSAKFASFITQYSTGQVSVEIEWELQKENSKRWNPEIQYTSNYNKSVNVDFTVDTNGVYSEPRPIGTRYLTRNL

SEQ ID NO: 1983 - protein, 735 aa, Artificial Sequence
  Synthetic Polypeptide
MAADGYLPDWLEDTLSEGIRQWWKLKPGPPPPKPAERHKDDSRGLVLPGYKYLGPFNGLDKGEPVNEADAAALEHDKAYDRQLDSGDNPYLKYNHADAEFQERLKEDTSFGGNLGRAVFQAKKRVLEPLGLVEEPVKTAPGKKRPVEHSPVEPDSSSGTGKAGQQPARKRLNFGQTGDADSVPDPQPLGQPPAAPTSLGSTTMATGSGAPMADNNEGADGVGNSSGNWHCDSQWLGDRVITTSTRTWALPTYNNHLYKQISSQSGASNDNHYFGHSTPWGYFDFNRFHCHFSPRDWQRLINNNWGFRPKRLNFKLFNIQVKEVTQNDGTTTIANNLTSTVQVFTDSEYQLPYVLGSAHQGCLPPFPADVFMVPQYGYLTLNNGSQAVGRSSFYCLEYFPSQMLRTGNNFTFSYTFEDVPFHSSYAHSQSLDRLMNPLIDQYLYYLNKTQSNSGTLRQSRLLFSQAGPTSMSLQAKNWLPGPCYRQQRLSKQANDNNNSNFPWTAATKYHLNGRDSLVNPGPAMASHKDDEEKFFPMHGTLIFGKQGTNANDADLDNVMITDEEEIRTTNPVATEQYGTVSNNLQNSNTGPTTGTVNHQGALPGMVWQDRDVYLQGPIWAKIPHTDGHFHPSPLMGGFGLKHPPPQIMIKNTPVPANPPTNFSSAKFASFITQYSTGQVSVEIEWELQKENSKRWNPEIQYTSNYNKSVNVDFTVDTNGVYSEPRPIGTRYLTRNL

SEQ ID NO: 1984 - protein, 735 aa, Artificial Sequence
  Synthetic Polypeptide
MAADGYLPDWLEDTLSEGIRQWWKLKPGPPPPKPAERHKDDSRGLVLPGYKYLGPFNGLDKGEPVNEADAAALEHDKAYDRQLDSGDNPYLKYNHADAEFQERLKEDTSFGGNLGRAVFQAKKRVLEPLGLVEEPVKTAPGKKRPVEHSPVEPDSSSGTGKAGQQPARKRLNFGQTGDADSVPDPQPLGQPPAAPTSLGSTTMATGSGAPMADNNEGADGVGNSSGNWHCDSQWLGDRVITTSTRTWALPTYNNHLYKQISSQSGASNDNHYFGHSTPWGYFDFNRFHCHFSPRDWQRLINNNWGFRPKRLNFKLFNIQVKEVTQNDGTTTIANNLTSTVQVFTDSEYQLPYVLGSAHQGCLPPFPADVFMVPQYGYLTLNNGSQAVGRSSFYCLEYFPSQMLRTGNNFTFSYTFEDVPFHSSYAHSQSLDRLMNPLIDQYLYYLNKTQSNSGTLQQSRLLFSQAGPTSMSLQAKNWLPGPCYRQQRLSKQANDNNNSNFPWTAATKYHLNGRDSLVNPGPAMASHKDDEEKFFPMHGTLIFGKQGTNANDADLDNVMITDEEEIRTTNPVATEQYGTVSNNLQNSNTGPTTGTVNRQGALPGMVWQDRDVYLQGPIWAKIPHTDGHFHPSPLMGGFGLKHPPPQIMIKNTPVPANPPTNFSSAKFASFITQYSTGQVSVEIEWELQKENSKRWNPEIQYTSNYNKSVNVDFTVDTNGVYSEPRPIGTRYLTRNL

SEQ ID NO: 1985 - protein, 735 aa, Artificial Sequence
  Synthetic Polypeptide
MAADGYLPDWLEDTLSEGIRQWWKLKPGPPPPKPAERHKDDSRGLVLPGYKYLGPFNGLDKGEPVNEADAAALEHDKAYDRQLDSGDNPYLKYNHADAEFQERLKEDTSFGGNLGRAVFQAKKRVLEPLGLVEEPVKTAPGKKRPVEHSPVEPDSSSGTGKAGQQPARKRLNFGQTGDADSVPDPQPLGQPPAAPTSLGSTTMATGSGAPMADNNEGADGVGNSSGNWHCDSQWLGDRVITTSTRTWALPTYNNHLYKQISSQSGASNDNHYFGHSTPWGYFDFNRFHCHFSPRDWQRLINNNWGFRPKRLNFKLFNIQVKEVTQNDGTTTIANNLTSTVQVFTDSEYQLPYVLGSAHQGCLPPFPADVFMVPQYGYLTLNNGSQAVGRSSFYCLEYFPSQMLRTGNNFTFSYTFEDVPFHSSYAHSQSLDRLMNPLIDQYLYYLNKTQSNSGTLQQSRLLFSQAGPTSMSLQAKNWLPGPCYRQQRLSKQANDNNNGNFPWTAATKYHLNGRDSLVNPGPAMASHKDDEEKFFPMHGTLIFGKQGTNANDADLDNVMITDEEEIRTTNPVATEQYGTVSNNLQNSNTGPTTGTVNHQGALPGMVWQDRDVYLQGPIWAKIPHTDGHFHPSPLMGGFGLKHPPPQIMIKNTPVPANPPTNFSSAKFASFITQYSTGQVSVEIEWELQKENSKRWNPEIQYTSNYNKSVNVDFTVDTNGVYSEPRPIGTRYLTRNL

SEQ ID NO: 1986 - protein, 735 aa, Artificial Sequence
  Synthetic Polypeptide
MAADGYLPDWLEDTLSEGIRQWWKLKPGPPPPKPAERHKDDSRGLVLPGYKYLGPFNGLDKGEPVNEADAAALEHDKAYDRQLDSGDNPYLKYNHADAEFQERLKEDTSFGGNLGRAVFQAKKRVLEPLGLVEEPVKTAPGKKRPVEHSPVEPDSSSGTGKAGQQPARKRLNFGQTGDADSVPDPQPLGQPPAAPTSLGSTTMATGSGAPMADNNEGADGVGNSSGNWHCDSQWLGDRVITTSTRTWALPTYNNHLYKQISSQSGASNDNHYFGHSTPWGYFDFNRFHCHFSPRDWQRLINNNWGFRPKRLNFKLFNIQVKEVTQNDGTTTIANNLTSTVQVFTDSEYQLPYVLGSAHQGCLPPFPADVFMVPQYGYLTLNNGSQAVGRSSFYCLEYFPSQMLRTGNNFTFSYTFEDVPFHSSYAHSQSLDRLMNPLIDQYLYYLNKTQSNSGTLQQSRLLFSQAGPTSMSLQAKNWLPGPCYRQQRLSKQANDNNNSNFPWTAATKYHLNGRDSLVNPGPAMASHKDDEEKFFPMHGTLIFGKQGTNANDADLDNVMITDEEEIRTTNPVATEQYGTVSNNLQNSNTGPTTGTVNHQGALPGMVWQDRDVYLQGPIWAKIPHTDGHFHPSPLMGGFGLKHPPPQIMIKNTPVPANPPTNFSSAKFASFITQYSTGQVSVEIEWELQKENGKRWNPEIQYTSNYNKSVNVDFTVDTNGVYSEPRPIGTRYLTRNL

SEQ ID NO: 1987 - protein, 735 aa, Artificial Sequence
  Synthetic Polypeptide
MAADGYLPDWLEDALSEGIRQWWKLKPGPPPPKPAERHKDDSRGLVLPGYKYLGPFNGLDKGEPVNEADAAALEHDKAYDRQLDSGDNPYLKYNHADAEFQERLKEDTSFGGNLGRAVFQAKKRVLEPLGLVEEPVKTAPGKKRPVEHSPVEPDSSSGTGKAGQQPARKRLNFGQTGDADSVPDPQPLGQPPAAPTSLGSTTMATGSGAPMADNNEGADGVGNSSGNWHCDSQWLGDRVITTSTRTWALPTYNNHLYKQISSQSGASNDNHYFGHSTPWGYFDFNRFHCHFSPRDWQRLINNNWGFRPKRLNFKLFNIQVKEVTQNDGTTTIANNLTSTVQVFTDSEYQLPYVLGSAHQGCLPPFPADVFMVPQYGYLTLNNGSQAVGRSSFYCLEYFPSQMLRTGNNFTFSYTFEDVPFHSSYAHSQSLDRLMNPLIDQYLYYLNKTQSNSGTLQQSRLLFSQAGPTSMSLQAKNWLPGPCYRQQRLSKQANDNNNSNFPWTAATKYHLNGRDSLVNPGPAMASHKDDEEKFFPMHGTLIFGKQGTNANDADLDNVMITDEEEIRTTNPVATEQYGTVSNNLQNSNTGPTTGTVNHQGALPGMVWQDRDVYLQGPIWAKIPHTDGHFHPSPLMGGFGLKHPPPQIMIKNTPVPANPPTNFSSAKFASFITQYSTGQVSVEIEWELQKENSKRWNPEIQYTSNYNKSVNVDFTVDTNGVYSEPRPIGTRYLTRNL

SEQ ID NO: 1988 - protein, 735 aa, Artificial Sequence
  Synthetic Polypeptide
MAADGYLPDWLEDTLSEGIRQWWKLKPGPPPPKPAERHKDDSRGLVLPGYKYLGPFNGLDKGEPVNEADAAALEHDKAYDRQLDSGDNPYLKYNHADAEFQERLKEDTPFGGNLGRAVFQAKKRVLEPLGLVEEPVKTAPGKKRPVEHSPVEPDSSSGTGKAGQQPARKRLNFGQTGDADSVPDPQPLGQPPAAPTSLGSTTMATGSGAPMADNNEGADGVGNSSGNWHCDSQWLGDRVITTSTRTWALPTYNNHLYKQISSQSGASNDNHYFGHSTPWGYFDFNRFHCHFSPRDWQRLINNNWGFRPKRLNFKLFNIQVKEVTQNDGTTTIANNLTSTVQVFTDSEYQLPYVLGSAHQGCLPPFPADVFMVPQYGYLTLNNGSQAVGRSSFYCLEYFPSQMLRTGNNFTFSYTFEDVPFHSSYAHSQSLDRLMNPLIDQYLYYLNKTQSNSGTLQQSRLLFSQAGPTSMSLQAKNWLPGPCYRQQRLSKQANDNNNSNFPWTAATKYHLNGRDSLVNPGPAMASHKDDEEKFFPMHGTLIFGKQGTNANDADLDNVMITDEEEIRTTNPVATEQYGTVSNNLQNSNTGPTTGTVNHQGALPGMVWQDRDVYLQGPIWAKIPHTDGHFHPSPLMGGFGLKHPPPQIMIKNTPVPANPPTNFSSAKFASFITQYSTGQVSVEIEWELQKENSKRWNPEIQYTSNYNKSVNVDFTVDTNGVYSEPRPIGTRYLTRNL

SEQ ID NO: 1989 - DNA, 2205 bp, Artificial Sequence
  Synthetic Polynucleotide
atggctgccgatggttatcttccagattggctcgaggacactctctctgaaggaataagacagtggtggaagctcaaacctggcccaccaccgccaaagcccgcagagcggcacaaggacgacagtaggggtcttgtgcttcctgggtacaagtacctcggacccttcaacggactcgacaaaggagagccggtcaacgaggcagacgccgcggccctcgagcacgacaaggcctacgaccggcagctcgacagcggagacaacccgtacctcaagtacaaccacgccgacgcggagtttcaggagcgtcttaaagaagatacgtcttttgggggcaacctcggacgagcagtattccaggcgaaaaagagggttcttgaacctctgggcctggttgaggagcctgttaagacggctccgggaaaaaagaggccggtagagcactctcctgtggagccagactcctcctcgggaaccggaaaggcgggccagcagcctgcaagaaaaagattgaattttggtcagactggagacgcagactcagtacctgacccccagcctctcggacagccaccagcagccccctctggtctgggaactaatacgatggctacaggcagtggcgcaccaatggcagacaataacgagggcgccgacggagtgggtaattcctcgggaaattggcattgcgattccacatggatgggcgacagagtcatcaccaccagcacccgaacctgggccctgcccacctacaacaaccacctctacaaacaaatttccagccaatcaggagcctcgaacgacaatcactactttggctacagcaccccttgggggtattttgacttcaacagattccactgccacttttcaccacgtgactggcaaagactcatcaacaacaactggggattccgacccaagagactcaacttcaagctctttaacattcaagtcaaagaggtcacgcagaatgacggtacgacgacgattgccaataaccttaccagcacggttcaggtgtttactgactcggagtaccagctcccgtacgtcctcggctcggcgcatcaaggatgcctcccgccgttcccagcagacgtcttcatggtgccacagtatggatacctcaccctgaacaacgggagtcaggcagtaggacgctcttcattttactgcctggagtactttccttctcagatgctgcgtaccggaaacaactttaccttcagctacacttttgaggacgttcctttccacagcagctacgctcacagccagagtctggaccgtctcatgaatcctctcatcgaccagtacctgtattacttgagcagaacacactccaatagtggaactcaccagcagtcaaggcttcagttttctcaggccggagcgagcatgtcgggaccagctaggaactggcttcctggaccctgttaccgccagcagcgagtatcaaagcagtctgcggataacaacaacagtgaatactcgtggactggagctaccaagtaccacctcaatggcagagactctctggtgaatccgggcccggccatggcaagccacaaggacgatgaagaaaagtttttcctcatgagcggggttctcatctttgggaagcaaggctcagatgaaaacaatgtggacattgaaaaggtcatgattacagacgaagaggaaatcaggacaaccaatcccgtggctacggagcagtatggttctgtatctaccaacctccaagaggcaaagacaagtccagctaccgcagatgtcaatcaccaaggcgttcttccaggcatggtctggcaggacagagatgtgtaccttcaggggcccatctgggcaaagattccacacacggacggacattttcacccctctcccctcatgggtggattcggacttaaacaccctcctccacagattctcatcaagaacaccccggtacctgcgaatccttcgaccaccttcagtgcggcaaagtttgcttccttcatcacacagtactccacgggacaggccagcgtggagatcgagtgggagctgcagaaggaaaacagcaaacgctggaatcccgaaattcagtacacttccaactacaacaagtctgttaatgtggactttactgtggacactaatggcgtgtattcagagcctcgccccattggcaccagatacctgactcgtaatctgtaa

SEQ ID NO: 1990 - DNA, 2205 bp, Artificial Sequence
  Synthetic Polynucleotide
atggctgccgatggttatcttccagattggctcgaggacactctctctgaaggaataagacagtggtggaagctcaaacctggcccaccaccgccaaagcccgcagagcggcacaaggacgacagtaggggtcttgtgcttcctgggtacaagtacctcggacccttcaacggactcgacaaaggagagccggtcaacgaggcagacgccgcggccctcgagcacgacaaggcctacgaccggcagctcgacagcggagacaacccgtacctcaagtacaaccacgccgacgcggagtttcaggagcgtcttaaagaagatacgtcttttgggggcaacctcggacgagcagtattccaggcgaaaaagagggttcttgaacctctgggcctggttgaggagcctgttaagacggctccgggaaaaaagaggccggtagagcactctcctgtggagccagactcctcctcgggaaccggaaaagcgggccagcagcctgcaagaaaaagattgaattttggtcagactggagacgcagactccgtacctgacccccagcctctcggacagccaccagcagcccccacaagtttgggatctactacaatggctacaggcagtggcgcaccaatggcagacaataacgagggtgccgatggagtgggtaattcctcaggaaattggcattgcgattcccaatggctgggcgacagagtcatcaccaccagcacccgaacctgggccctgcccacctacaacaaccacctctacaagcaaatctccagccaatcaggagcatcgaacgacaaccactactttggccacagcaccccttgggggtattttgacttcaacagattccactgtcacttctccccacgtgactggcaaagactcatcaacaacaactggggattccgacccaagagactcaacttcaagctctttaacattcaagtcaaagaggtcacgcagaatgacggtacgacgacgattgccaataaccttaccagcacggttcaggtgtttactgactcggagtaccagctcccgtacgtcctcggctcggcgcatcaaggatgcctcccgccgttcccagcagacgtcttcatggtgccacagtatggatacctcaccctgaacaacgggagtcaggcagtaggacgctcttcattttactgcctggagtacttcccttctcagatgctgcgtaccggaaacaactttaccttcagctacacttttgaggacgttcctttccacagcagctacgctcacagccagagtctggaccgtctcatgaatcctctcatcgaccagtacctgtattacttgagcagaacacactccaatagtggaactcaccagcagtcaaggcttcagttttctcaggccggagcgagcatgtcgggaccagctaggaactggcttcctggaccctgttaccgccagcagcgagtatcaaagcagtctgcggataacaacaacagtgaatactcgtggactggagctaccaagtaccgcctcaatggcagagactctctggtgaatccgggctcggccatggcaagccacaaggacgatgaagaaaagtttttcctcatgagcggggttctcatctttgggaagcaaggctcagatgaaaacaatgtggacattgaaaaggtcatgattacagacgaagaggaaatcaggacaaccaatcccgtggctacggagcagtatggttctgtatctaccaacctccaagaggcaaagacaagtccagctaccgcagatgtcaatcaccaaggcgttcttccaggcatggtctggcaggacagagatgtgtaccttcaggggcccatctgggcaaagattccacacacggacggacattttcacccctctcccctcatgggtggattcggacttaaacaccctcctccacagattctcatcaagaacaccccggtacctgcgaatccttcgaccaccttcagtgcggcaaagtttgcttccttcatcacacagtactccacgggacaggtcagcgtggagatcgagtgggagctgcagaaggaaaacagcaaacgctggaatcccgaaattcagtacacttccaactacaacaagtctgttaatgtggactttactgtggacactaatggcgtgtattcagagcctcgccccattggcaccagatacctgactcgtaatctgtaa

SEQ ID NO: 1991 - DNA, 2205 bp, Artificial Sequence
  Synthetic Polynucleotide
atggctgccgatggttatcttccagattggctcgaggacactctctctgaaggaataagacagtggtggaagctcaaacctggcccaccaccgccaaagcccgcagagcggcacaaggacgacagtaggggtcttgtgcttcctgggtacaagtacctcggacccttcaacggactcgacaaaggagagccggtcaacgaggcagacgccgcggccctcgagcacgacaaggcctacgaccggcagctcgacagcggagacaacccgtacctcaagtacaaccacgccgacgcggagtttcaggagcgtcttaaagaagatacgtcttttgggggcaacctcggacgagcagtattccaggcgaaaaagagggttcttgaacctctgggcctggttgaggagcctgttaagacggctccgggaaaaaagaggccggtagagcactctcctgtggagccagactcctcctcgggaaccggaaaggcgggccagcagcctgcaagaaaaagattgaattttggtcagactggagacgcagactcagtacctgacccccagcctctcggacagccaccagcagccccctctggtctgggaactaatacgatggctacaggcagtggcgcaccaatggcagacaataacgagggcgccgacggagtgggtaattcctcgggaaattggcattgcgattccacatggatgggcgacagagtcatcaccaccagcacccgaacctgggccctgcccacctacaacaaccacctctacaaacaaatttccagccaatcaggagcctcgaacgacaatcactactttggctacagcaccccttgggggtattttgacttcaacagattccactgccacttttcaccacgtgactggcaaagactcatcaacaacaactggggattccgacccaagagactcaacttcaagctctttaacattcaagtcaaagaggtcacgcagaatgacggtacgacgacgattgccaataaccttaccagcacggttcaggtgtttactgactcggagtaccagctcccgtacgtcctcggctcggcgcatcaaggatgcctcccgccgttcccagcagacgtcttcatggtgccacagtatggatacctcaccctgaacaacgggagtcaggcagtaggacgctcttcattttactgcctggagtacttcccttctcagatgctgcgtaccggaaacaactttaccttcagctacacttttgaggacgttcctttccacagcagctacgctcacagccagagtctggaccgtctcatgaatcctctcatcgaccagtacctgtattacttgagcagaacacactccaatagtggaactcaccagcagtcaaggcttcagttttctcaggccggagcgagcatgtcgggaccagctaggaactggcttcctggaccctgttaccgccagcagcgagtatcaaagcagtctgcggataacaacaacagtgaatactcgtggactggagctaccaagtaccgcctcaatggcagagactctctggtgaatccgggctcggccatggcaagccacaaggacgatgaagaaaagtttttcctcatgagcggggttctcatctttgggaagcaaggctcagatgaaaacaatgtggacattgaaaaggtcatgattacagacgaagaggaaatcaggacaaccaatcccgtggctacggagcagtatggttctgtatctaccaacctccaagaggcaaagacaagtccagctaccgcagatgtcaatcaccaaggcgttcttccaggcatggtctggcaggacagagatgtgtaccttcaggggcccatctgggcaaagattccacacacggacggacattttcacccctctcccctcatgggtggattcggacttaaacaccctcctccacagattctcatcaagaacaccccggtacctgcgaatccttcgaccaccttcagtgcggcaaagtttgcttccttcatcacacagtactccacgggacaggtcagcgtggagatcgagtgggagctgcagaaggaaaacagcaaacgctggaatcccgaaattcagtacacttccaactacaacaagtctgttaatgtggactttactgtggacactaatggcgtgtattcagagcctcgccccattggcaccagatacctgactcgtaatctgtaa

SEQ ID NO: 1992 - DNA, 2205 bp, Artificial Sequence
  Synthetic Polynucleotide
atggctgccgatggttatcttccagattggctcgaggacactctctctgaaggaataagacagtggtggaagctcaaacctggcccaccaccgccaaagcccgcagagcggcacaaggacgacagtaggggtcttgtgcttcctgggtacaagtacctcggacccttcaacggactcgacaaaggagagccggtcaacgaggcagacgccgcggccctcgagcacgacaaggcctacgaccggcagctcgacagcggagacaacccgtacctcaagtacaaccacgccgacgcggagtttcaggagcgtcttaaagaagatacgtcttttgggggcaacctcggacgagcagtattccaggcgaaaaagagggttcttgaacctctgggcctggttgaggagcctgttaagacggctccgggaaaaaagaggccggtagagcactctcctgtggagccagactcctcctcgggaaccggaaaagcgggccagcagcctgcaagaaaaagattgaattttggtcagactggagacgcagactccgtacctgacccccagcctctcggacagccaccagcagcccccacaagtttgggatctactacaatggctacaggcagtggcgcaccaatggcagacaataacgagggtgccgatggagtgggtaattcctcaggaaattggcattgcgattcccaatggctgggcgacagagtcatcaccaccagcacccgaacctgggccctgcccacctacaacaaccacctctacaagcaaatctccagccaatcaggagcatcgaacgacaaccactactttggccacagcaccccttgggggtattttgacttcaacagattccactgtcacttctccccacgtgactggcaaagactcatcaacaacaactggggattccgacccaagagactcaacttcaagctctttaacattcaagtcaaagaggtcacgcagaatgacggtacgacgacgattgccaataaccttaccagcacggttcaggtgtttactgactcggagtaccagctcccgtacgtcctcggctcggcgcatcaaggatgcctcccgccgttcccagcagacgtcttcatggtgccacagtatggatacctcaccctgaacaacgggagtcaggcagtaggacgctcttcattttactgcctggagtactttccttctcagatgctgcgtaccggaaacaactttaccttcagctacacttttgaggacgttcctttccacagcagctacgctcacagccagagtctggaccgtctcatgaatcctctcatcgaccagtacctgtattacttgagcagaacacactccaatagtggaactcaccagcagtcaaggcttcagttttctcaggccggagcgagcatgtcgggaccagctaggaactggcttcctggaccctgttaccgccagcagcgagtatcaaagcagtctgcggataacaacaacagtgaatactcgtggactggagctaccaagtaccacctcaatggcagagactctctggtgaatccgggcccggccatggcaagccacaaggacgatgaagaaaagtttttcctcatgagcggggttctcatctttgggaagcaaggctcagatgaaaacaatgtggacattgaaaaggtcatgattacagacgaagaggaaatcaggacaaccaatcccgtggctacggagcagtatggttctgtatctaccaacctccaagaggcaaagacaagtccagctaccgcagatgtcaatcaccaaggcgttcttccaggcatggtctggcaggacagagatgtgtaccttcaggggcccatctgggcaaagattccacacacggacggacattttcacccctctcccctcatgggtggattcggacttaaacaccctcctccacagattctcatcaagaacaccccggtacctgcgaatccttcgaccaccttcagtgcggcaaagtttgcttccttcatcacacagtactccacgggacaggccagcgtggagatcgagtgggagctgcagaaggaaaacagcaaacgctggaatcccgaaattcagtacacttccaactacaacaagtctgttaatgtggactttactgtggacactaatggcgtgtattcagagcctcgccccattggcaccagatacctgactcgtaatctgtaa

SEQ ID NO: 1993 - DNA, 2205 bp, Artificial Sequence
  Synthetic Polynucleotide
atggctgccgatggttatcttccagattggctcgaggacactctctctgaaggaataagacagtggtggaagctcaaacctggcccaccaccgccaaagcccgcagagcggcacaaggacgacagtaggggtcttgtgcttcctgggtacaagtacctcggacccttcaacggactcgacaaaggagagccggtcaacgaggcagacgccgcggccctcgagcacgacaaggcctacgaccggcagctcgacagcggagacaacccgtacctcaagtacaaccacgccgacgcggagtttcaggagcgtcttaaagaagatacgtcttttgggggcaacctcggacgagcagtattccaggcgaaaaagagggttcttgaacctctgggcctggttgaggagcctgttaagacggctccgggaaaaaagaggccggtagagcactctcctgtggagccagactcctcctcgggaaccggaaaagcgggccagcagcctgcaagaaaaagattgaattttggtcagactggagacgcagactccgtacctgacccccagcctctcggacagccaccagcagcccccacaagtttgggatctactacaatggctacaggcagtggcgcaccaatggcagacaataacgagggtgccgatggagtgggtaattcctcaggaaattggcattgcgattcccaatggctgggcgacagagtcatcaccaccagcacccgaacctgggccctgcccacctacaacaaccacctctacaagcaaatctccagccaatcaggagcatcgaacgacaaccactactttggctacagcaccccttgggggtattttgacttcaacagattccactgtcacttctccccacgtgactggcaaagactcatcaacaacaactggggattccgacccaagagactcaacttcaagctctttaacattcaagtcaaagaggtcacgcagaatgacggtacgacgacgattgccaataaccttaccagcacggttcaggtgtttactgactcggagtaccagctcccgtacgtcctcggctcggcgcatcaaggatgcctcccgccgttcccagcagacgtcttcatggtgccacagtatggatacctcaccctgaacaacgggagtcaggcagtaggacgctcttcattttactgcctggagtacttcccttctcagatgctgcgtaccggaaacaactttaccttcagctacacttttgaggacgttcctttccacagcagctacgctcacagccagagtctggaccgtctcatgaatcctctcatcgaccagtacctgtattacttgagcagaacacactccaatagtggaactcaccagcagtcaaggcttcagttttctcaggccggagcgagcatgtcgggaccagctaggaactggcttcctggaccctgttaccgccagcagcgagtatcaaagcagtctgcggataacaacaacagtgaatactcgtggactggagctaccaagtaccgcctcaatggcagagactctctggtgaatccgggctcggccatggcaagccacaaggacgatgaagaaaagtttttcctcatgagcggggttctcatctttgggaagcaaggctcagatgaaaacaatgtggacattgaaaaggtcatgattacagacgaagaggaaatcaggacaaccaatcccgtggctacggagcagtatggttctgtatctaccaacctccaagaggcaaagacaagtccagctaccgcagatgtcaatcaccaaggcgttcttccaggcatggtctggcaggacagagatgtgtaccttcaggggcccatctgggcaaagattccacacacggacggacattttcacccctctcccctcatgggtggattcggacttaaacaccctcctccacagattctcatcaagaacaccccggtacctgcgaatccttcgaccaccttcagtgcggcaaagtttgcttccttcatcacacagtactccacgggacaggtcagcgtggagatcgagtgggagctgcagaaggaaaacagcaaacgctggaatcccgaaattcagtacacttccaactacaacaagtctgttaatgtggactttactgtggacactaatggcgtgtattcagagcctcgccccattggcaccagatacctgactcgtaatctgtaa

SEQ ID NO: 1994 - DNA, 2205 bp, Artificial Sequence
  Synthetic Polynucleotide
atggctgccgatggttatcttccagattggctcgaggacactctctctgaaggaataagacagtggtggaagctcaaacctggcccaccaccgccaaagcccgcagagcggcacaaggacgacagtaggggtcttgtgcttcctgggtacaagtacctcggacccttcaacggactcgacaaaggagagccggtcaacgaggcagacgccgcggccctcgagcacgacaaggcctacgaccggcagctcgacagcggagacaacccgtacctcaagtacaaccacgccgacgcggagtttcaggagcgtcttaaagaagatacgtcttttgggggcaacctcggacgagcagtattccaggcgaaaaagagggttcttgaacctctgggcctggttgaggaacctgttaagacggctccgggaaaaaagaggccggtagagcactctcctgtggagccagactcctcctcgggaaccggaaaggcgggccagcagcctgcaagaaaaagattgaattttggtcagactggagacgcagactcagtacctgacccccagcctctcggacagccaccagcagccccctctggtctgggaactaatacgatggctacaggcagtggcgcaccaatggcagacaataacgagggcgccgacggagtgggtaattcctcgggaaattggcattgcgattccacatggatgggcgacagagtcatcaccaccagcacccgaacctgggccctgcccacctacaacaaccacctctacaaacaaatttccagccaatcaggagcctcgaacgacaatcactactttggctacagcaccccttgggggtattttgacttcaacagattccactgccacttttcaccacgtgactggcaaagactcatcaacaacaactggggattccgacccaagagactcaacttcaagctctttaacattcaagtcaaagaggtcacgcagaatgacggtacgacgacgattgccaataaccttaccagcacggttcaggtgtttactgactcggagtaccagctcccgtacgtcctcggctcggcgcatcaaggatgcctcccgccgttcccagcagacgtcttcatggtgccacagtatggatacctcaccctgaacaacgggagtcaggcagtaggacgctcttcattttactgcctggagtacttcccttctcagatgctgcgtaccggaaacaactttaccttcagctacacttttgaggacgttcctttccacagcagctacgctcacagccagagtctggaccgtctcatgaatcctctcatcgaccagtacctgtattacttgagcagaacacactccaatagtggaactcaccagcagtcaaggcttcagttttctcaggccggagcgagcatgtcgggaccagctaggaactggcttcctggaccctgttaccgccagcagcgagtatcaaagcagtctgcggataacaacaacagtgaatactcgtggactggagctaccaagtaccgcctcaatggcagagactctctggtgaatccgggctcggccatggcaagccacaaggacgatgaagaaaagtttttcctcatgagcggggttctcatctttgggaagcaaggctcagatgaaaacaatgtggacattgaaaaggtcatgattacagacgaagaggaaatcaggacaaccaatcccgtggctacggagcagtatggttctgtatctaccaacctccaagaggcaaagacaagtccagctaccgcagatgtcaatcaccaaggcgttcttccaggcatggtctggcaggacagagatgtgtaccttcaggggcccatctgggcaaagattccacacacggacggacattttcacccctctcccctcatgggtggattcggacttaaacaccctcctccacagattctcatcaagaacaccccggtacctgcgaatccttcgaccaccttcagtgcggcaaagtttgcttccttcatcacacagtactccacgggacaggccagcgtggagatcgagtgggagctgcagaaggaaaacagcaaacgctggaatcccgaaattcagtacacttccaactacaacaagtctgttaatgtggactttactgtggacactaatggcgtgtattcagagcctcgccccattggcaccagatacctgactcgtaatctgtaa

SEQ ID NO: 1995 - DNA, 2205 bp, Artificial Sequence
  Synthetic Polynucleotide
atggctgccgatggttatcttccagattggctcgaggacactctctctgaaggaataagacagtggtggaagctcaaacctggcccaccaccgccaaagcccgcagagcggcacaaggacgacagtaggggtcttgtgcttcctgggtacaagtacctcggacccttcaacggactcgacaaaggagagccggtcaacgaggcagacgccgcggccctcgagcacgacaaggcctacgaccggcagctcgacagcggagacaacccgtacctcaagtacaaccacgccgacgcggagtttcaggagcgtcttaaagaagatacgtcttttgggggcaacctcggacgagcagtattccaggcgaaaaagagggttcttgaacctctgggcctggttgaggagcctgttaagacggctccgggaaaaaagaggccggtagagcactctcctgtggagccagactcctcctcgggaaccggaaaagcgggccagcagcctgcaagaaaaagattgaattttggtcagactggagacgcagactccgtacctgacccccagcctctcggacagccaccagcagcccccacaagtttgggatctactacaatggctacaggcagtggcgcaccaatggcagacaataacgagggtgccgatggagtgggtaattcctcgggaaattggcattgcgattccacatggatgggcgacagagtcatcaccaccagcacccgaacctgggccctgcccacctacaacaaccacctctacaaacaaatttccagccaatcaggagcctcgaacgacaatcactactttggctacagcaccccttgggggtattttgacttcaacagattccactgccacttttcaccacgtgactggcaaagactcatcaacaacaactggggattccgacccaagagactcaacttcaagctctttaacattcaagtcaaagaggtcacgcagaatgacggtacgacgacgattgccaataaccttaccagcacggttcaggtgtttactgactcggagtaccagctcccgtacgtcctcggctcggcgcatcaaggatgcctcccgccgttcccagcagacgtcttcatggtgccacagtatggatacctcaccctgaacaacgggagtcaggcagtaggacgctcttcattttactgcctggagtacttcccttctcagatgctgcgtaccggaaacaactttaccttcagctacacttttgaggacgttcctttccacagcagctacgctcacagccagagtctggaccgtctcatgaatcctctcatcgaccagtacctgtattacttgagcagaacacactccaatagtggaactcaccagcagtcaaggcttcagttttctcaggccggagcgagcatgtcgggaccagctaggaactggcttcctggaccctgttaccgccagcagcgagtatcaaagcagtctgcggataacaacaacagtgaatactcgtggactggagctaccaagtaccgcctcaatggcagagactctctggtgaatccgggctcggccatggcaagccacaaggacgatgaagaaaagtttttcctcatgagcggggttctcatctttgggaagcaaggctcagatgaaaacaatgtggacattgaaaaggtcatgattacagacgaagaggaaatcaggacaaccaatcccgtggctacggagcagtatggttctgtatctaccaacctccaagaggcaaagacaagtccagctaccgcagatgtcaatcaccaaggcgttcttccaggcatggtctggcaggacagagatgtgtaccttcaggggcccatctgggcaaagattccacacacggacggacattttcacccctctcccctcatgggtggattcggacttaaacaccctcctccacagattctcatcaagaacaccccggtacctgcgaatccttcgaccaccttcagtgcggcaaagtttgcttccttcatcacacagtactccacgggacaggtcagcgtggagatcgagtgggagctgcagaaggaaaacagcaaacgctggaatcccgaaattcagtacacttccaactacaacaagtctgttaatgtggactttactgtggacactaatggcgtgtattcagagcctcgccccattggcaccagatacctgactcgtaatctgtaa

SEQ ID NO: 1996 - DNA, 2205 bp, Artificial Sequence
  Synthetic Polynucleotide
atggctgccgatggttatcttccagattggctcgaggacactctctctgaaggaataagacagtggtggaagctcaaacctggcccaccaccaccaaagcccgcagagcggcataaggacgacagcaggggtcttgtgcttcctgggtacaagtacctcggacccttcaacggactcgacaagggagagccggtcaacgaggcagacgccgcggccctcgagcacgacaaagcctacgaccggcagctcgacagcggagacaacccgtacctcaagtacaaccacgccgacgcggagtttcaggagcgccttaaagaagatacgtcttttgggggcaacctcggacgagcagtcttccaggcgaaaaagagggttcttgaacctctgggcctggttgaggaacctgttaagacggctccgggaaaaaagaggccggtagagcactctcctgtggagccagactcctcctcgggaaccggaaaggcgggccagcagcctgcaagaaaaagattgaattttggtcagactggagacgcagactcagtacctgacccccagcctctcggacagccaccagcagccccctctggtctgggaactaatacgatggctacaggcagtggcgcaccaatggcagacaataacgagggcgccgacggagtgggtaattcctcgggaaattggcattgcgattccacatggatgggcgacagagtcatcaccaccagcacccgaacctgggccctgcccacctacaacaaccacctctacaaacaaatttccagccaatcaggagcctcgaacgacaatcactactttggctacagcaccccttgggggtattttgacttcaacagattccactgccacttttcaccacgtgactggcaaagactcatcaacaacaactggggattccgacccaagagactcaacttcaagctctttaacattcaagtcaaagaggtcacgcagaatggcggtacgacgacgattgccaataaccttaccagcacggttcaggtgtttactgactcggagtaccagctcccgtacgtcctcggctcggcgcatcaaggatgcctcccgccgttcccagcagacgtcttcatggtgccacagtatggatacctcaccctgaacaacgggagtcaggcagtaggacgctcttcattttactgcctggagtacttcccttctcagatgctgcgtaccggaaacaactttaccttcagctacacttttgaggacgttcctttccacagcagctacgctcacagccagagtctggaccgtctcatgaatcctctcatcgaccagtacctgtattacttgagcagaacacactccaatagtggaactcaccagcagtcaaggcttcagttttctcaggccggagcgagcatgtcgggaccagctaggaactggcttcctggaccctgttaccgccagcagcgagtatcaaagcagtctgcggataacaacaacagtgaatactcgtggactggagctaccaagtaccgcctcaatggcagagactctctggtgaatccgggctcggccatggcaagccacaaggacgatgaagaaaagtttttcctcatgagcggggttctcatctttgggaagcaaggctcagatgaaaacaatgtggacattgaaaaggtcatgattacagacgaagaggaaatcaggacaaccaatcccgtggctacggagcagtatggttctgtatctaccaacctccaagaggcaaagacaagtccagctaccgcagatgtcaatcaccaaggcgttcttccaggcatggtctggcaggacagagatgtgtaccttcaggggcccatctgggcaaagattccacacacggacggacattttcacccctctcccctcatgggtggattcggacttaaacaccctcctccacagattctcatcaagaacaccccggtacctgcgaatccttcgaccaccttcagtgcggcaaagtttgcttccttcatcacacagtactccacgggacaggtcagcgtggagatcgagtgggagctgcagaaggaaaacagcaaacgctggaatcccgaaattcagtacacttccaactacaacaagtctgttaatgtggactttactgtggacactaatggcgtgtattcagagcctcgccccattggcaccagatacctgactcgtaatctgtaa

SEQ ID NO: 1997 - DNA, 2208 bp, Artificial Sequence
  Synthetic Polynucleotide
atggctgccgatggttatcttccagattggctcgaggacactctctctgaaggaataagacagtggtggaagctcaaacctggcccaccaccaccaaagcccgcagagcggcataaggacgacagcaggggtcttgtgcttcctgggtacaagtacctcggacccttcaacggactcgacaagggagagccggtcaacgaggcagacgccgcggccctcgagcacgacaaagcctacgaccggcagctcgacagcggagacaacccgtacctcaagtacaaccacgccgacgcggagtttcaggagcgccttaaagaagatacgtcttttgggggcaacctcggacgagcagtcttccaggcgaaaaagagggttcttgaacctctgggcctggttgaggaacctgttaagacggctccgggaaaaaagaggccggtagagcactctcctgtggagccagactcctcctcgggaaccggaaaggcgggccagcagcctgcaagaaaaagattgaattttggtcagactggagacgcagactcagtacctgacccccagcctctcggacagccaccagcagccccctctggtctgggaactaatacgatggctacaggcagtggcgcaccaatggcagacaataacgagggcgccgacggagtgggtaattcctcgggaaattggcattgcgattccacatggatgggcgacagagtcatcaccaccagcacccgaacctgggccctgcccacctacaacaaccacctctacaaacaaatttccagccaatcaggagcctcgaacgacaatcactactttggctacagcaccccttgggggtattttgacttcaacagattccactgccacttttcaccacgtgactggcaaagactcatcaacaacaactggggattccgacccaggagactcaacttcaagctctttaacattcaagtcaaagaggtcacgcagaatgacggtacgacgacgattgccaataaccttaccagcacggttcaggtgtttactgactcggagtaccagctcccgtacgtcctcggctcggcgcatcaaggatgcctcccgccgttcccagcagacgtcttcatggtgccacagtatggatacctcaccctgaacaacgggagtcaggcagtaggacgctcttcattttactgcctggagtactttccttctcagatgctgcgtaccggaaacaactttaccttcagctacacttttgaggacgttcctttccacagcagctacgctcacagccagagtctggaccgtctcatgaatcctctcatcgaccagtacctgtattacttgagcagaacaaacactccaagtggaaccaccacgcagtcaaggcttcagttttctcaggccggagcgagtgacattcgggaccagtctaggaactggcttcctggaccctgttaccgccagcagcgagtatcaaagacatctgcggataacaacaacagtgaatactcgtggactggagctaccaagtaccacctcaatggcagagactctctggtgaatccgggcccggccatggcaagccacaaggacgatgaagaaaagttttttcctcagagcggggttctcatctttgggaagcaaggctcagagaaaacaaatgtggacattgaaaaggtcatgattacagacgaagaggaaatcaggacaaccaatcccgtggctacggagcagtatggttctgtatctaccaacctccagagaggcaacagacaagcagctaccgcagatgtcaacacacaaggcgttcttccaggcatggtctggcaggacagagatgtgtaccttcaggggcccatctgggcaaagattccacacacggacggacattttcacccctctcccctcatgggtggattcggacttaaacaccctcctccacagattctcatcaagaacaccccggtacctgcgaatccttcgaccaccttcagtgcggcaaagtttgcttccttcatcacacagtactccacgggacaggtcagcgtggagatcgagtgggagctgcagaaggaaaacagcaaacgctggaatcccgaaattcagtacacttccaactacaacaagtctgttaatgtggactttactgtggacactaatggcgtgtattcagagcctcgccccattggcaccagatacctgactcgtaatctgtaa

SEQ ID NO: 1998 - DNA, 2208 bp, Artificial Sequence
  Synthetic Polynucleotide
atggctgccgatggttatcttccagattggctcgaggacactctctctgaaggaataagacagtggtggaagctcaaacctggcccaccaccaccaaagcccgcagagcggcataaggacgacagcaggggtcttgtgcttcctgggtacaagtacctcggacccttcaacggactcgacaagggagagccggtcaacgaggcagacgccgcggccctcgagcacgacaaagcctacgaccggcagctcgacagcggagacaacccgtacctcaagtacaaccacgccgacgcggagtttcaggagcgccttaaagaagatacgtcttttgggggcaacctcggacgagcagtcttccaggcgaaaaagagggttcttgaacctctgggcctggttgaggaacctgttaagacggctccgggaaaaaagaggccggtagagcactctcctgtggagccagactcctcctcgggaaccggaaaggcgggccagcagcctgcaagaaaaagattgaattttggtcagactggagacgcagactcagtacctgacccccagcctctcggacagccaccagcagccccctctggtctgggaactaatacgatggctacaggcagtggcgcaccaatggcagacaataacgagggcgccgacggagtgggtaattcctcgggaaattggcattgcgattccacatggatgggcgacagagtcatcaccaccagcacccgaacctgggccctgcccacctacaacaaccacctctacaaacaaatttccagccaatcaggagcctcgaacgacaatcactactttggctacagcaccccttgggggtattttgacttcaacagattccactgccacttttcaccacgtgactggcaaagactcatcaacaacaactggggattccgacccaagagactcaacttcaagctctttaacattcaagtcaaagaggtcacgcagaatgacggtacgacgacgattgccaataaccttaccagcacggttcaggtgtttactgactcggagtaccagctcccgtacgtcctcggctcggcgcatcaaggatgcctcccgccgttcccagcagacgtcttcatggtgccacagtatggatacctcaccctgaacaacgggagtcaggcagtaggacgctcttcattttactgcctggagtactttccttctcagatgctgcgtaccggaaacaactttaccttcagctacacttttgaggacgttcctttccacagcagctacgctcgcagccagagtctggaccgtctcatgaatcctctcatcgaccagtacctgtattacttgagcagaacaaacactccaagtggaaccaccacgcagtcaaggcttcagttttctcaggccggagcgagtgacattcgggaccagtctaggaactggcttcctggaccctgttaccgccagcagcgagtatcaaagacatctgcggataacaacaacagtgaatactcgtggactggagctaccaagtaccacctcaatggcagagactctctggtgaatccgggcccggccatggcaagccacaaggacgatgaagaaaagttttttcctcagagcggggttctcatctttgggaagcaaggctcagagaaaacaaatgtggacattgaaaaggtcatgattacagacgaagaggaaatcaggacaaccaatcccgtggctacggagcagtatggttctgtatctaccaacctccagagaggcaacagacaagcagctaccgcagatgtcaacacacaaggcgttcttccaggcatggtctggcaggacagagatgtgtaccttcaggggcccatctgggcaaagattccacacacggacggacattttcacccctctcccctcatgggtggattcggacttaaacaccctcctccacagattctcatcaagaacaccccggtacctgcgaatccttcgaccaccttcagtgcggcaaagtttgcttccttcatcacacagtactccacgggacaggtcagcgtggagatcgagtgggagctgcagaaggaaaacagcaaacgctggaatcccgaaattcagtacacttccaactacaacaagtctgttaatgtggactttactgtggacactaatggcgtgtattcagagcctcgccccattggcaccagatacctgactcgtaatctgtaa

SEQ ID NO: 1999 - DNA, 2208 bp, Artificial Sequence
  Synthetic Polynucleotide
atggctgccgatggttatcttccagattggctcgaggacactctctctgaaggaataagacagtggtggaagctcaaacctggcccaccaccaccaaagcccgcagagcggcataaggacgacagcaggggtcttgtgcttcctgggtacaagtacctcggacccttcaacggactcgacaagggagagccggtcaacgaggcagacgccgcggccctcgagcacgacaaagcctacgaccggcagctcgacagcggagacaacccgtacctcaagtacaaccacgccgacgcggagtttcaggagcgccttaaagaagatacgtcttttgggggcaacctcggacgagcagtcttccaggcgaaaaagagggttcttgaacctctgggcctggttgaggaacctgttaagacggctccgggaaaaaagaggccggtagagcactctcctgtggagccagactcctcctcgggaaccggaaaggcgggccagcagcctgcaagaaaaagattgaattttggtcagactggagacgcagactcagtacctgacccccagcctctcggacagccaccagcagccccctctggtctgggaactaatacgatggctacaggcagtggcgcaccaatggcagacaataacgagggcgccgacggagtgggtaattcctcgggaaattggcattgcgattccacatggatgggcgacagagtcatcaccaccagcacccgaacctgggccctgcccacctacaacaaccacctctacaaacaaatttccagccaatcaggagcctcgaacgacaatcactactttggctacagcaccccttgggggtattttgacttcaacagattccactgccacttttcaccacgtgactggcaaagactcatcaacaacaactggggattccgacccaagagactcaacttcaagctctttaacattcaagtcaaagaggtcacgcagaatgacggtacgacgacgattgccaataaccttaccagcacggttcaggtgtttactgactcggagtaccagctcccgtacgtcctcggctcggcgcatcaaggatgcctcccgccgttcccagcagacgtcttcatggtgccacagtatggatacctcaccctgaacaacgggagtcaggcagtaggacgctcttcattttactgcctggagtactttccttctcagatgctgcgtaccggaaacaactttaccttcagctacacttttgaggacgttcctttccacagcagctacgctcacagccagagtctggaccgtctcatgaatcctctcatcgaccagtacctgtattacttgagcagaacaaacactccaagtggaaccaccacgcagtcaaggcttcagttttctcaggccggagcgagtgacattcgggaccagtctaggaactggcttcctggaccctgttaccgccagcagcgagtatcaaagacatctgcggataacaacaacagtgaatactcgtggactggagttaccaagtaccacctcaatggcagagactctctggtgaatccgggcccggccatggcaagccacaaggacgatgaagaaaagttttttcctcagagcggggttctcatctttgggaagcaaggctcagagaaaacaaatgtggacattgaaaaggtcatgattacagacgaagaggaaatcaggacaaccaatcccgtggctacggagcagtatggttctgtatctaccaacctccagagaggcaacagacaagcagctaccgcagatgtcaacacacaaggcgttcttccaggcatggtctggcaggacagagatgtgtaccttcaggggcccatctgggcaaagattccacacacggacggacattttcacccctctcccctcatgggtggattcggacttaaacaccctcctccacagattctcatcaagaacaccccggtacctgcgaatccttcgaccaccttcagtgcggcaaagtttgcttccttcatcacacagtactccacgggacaggtcagcgtggagatcgagtgggagctgcagaaggaaaacagcaaacgctggaatcccgaaattcagtacacttccaactacaacaagtctgttaatgtggactttactgtggacactaatggcgtgtattcagagcctcgccccattggcaccagatacctgactcgtaatctgtaa

SEQ ID NO: 2000 - DNA, 2208 bp, Artificial Sequence
  Synthetic Polynucleotide
atggctgccgatggttatcttccagattggctcgaggacactctctctgaaggaataagacagtggtggaagctcaaacctggcccaccaccaccaaagcccgcagagcggcataaggacgacagcaggggtcttgtgcttcctgggtacaagtacctcggacccttcaacggactcgacaagggagagccggtcaacgaggcagacgccgcggccctcgagcacgacaaagcctacgaccggcagctcgacagcggagacaacccgtaccccaagtacaaccacgccgacgcggagtttcaggagcgccttaaagaagatacgtcttttgggggcaacctcggacgagcagtcttccaggcgaaaaagagggttcttgaacctctgggcctggttgaggaacctgttaagacggctccgggaaaaaagaggccggtagagcactctcctgtggagccagactcctcctcgggaaccggaaaggcgggccagcagcctgcaagaaaaagattgaattttggtcagactggagacgcagactcagtacctgacccccagcctctcggacagccaccagcagccccctctggtctgggaactaatacgatggctacaggcagtggcgcaccaatggcagacaataacgagggcgccgacggagtgggtaattcctcgggaaattggcattgcgattccacatggatgggcgacagagtcatcaccaccagcacccgaacctgggccctgcccacctacaacaaccacctctacaaacaaatttccagccaatcaggagcctcgaacgacaatcactactttggctacagcaccccttgggggtattttgacttcaacagattccactgccacttttcaccacgtgactggcaaagactcatcaacaacaactggggattccgacccaagagactcaacttcaagctctttaacattcaagtcaaagaggtcacgcagaatgacggtacgacgacgattgccaataaccttaccagcacggttcaggtgtttactgactcggagtaccagctcccgtacgtcctcggctcggcgcatcaaggatgcctcccgccgttcccagcagacgtcttcatggtgccacagtatggatacctcaccctgaacaacgggagtcaggcagtaggacgctcttcattttactgcctggagtactttccttctcagatgctgcgtaccggaaacaactttaccttcagctacacttttgaggacgttcctttccacagcagctacgctcacagccagagtctggaccgtctcatgaatcctctcatcgaccagtacctgtattacttgagcagaacaaacactccaagtggaaccaccacgcagtcaaggcttcagttttctcaggccggagcgagtgacattcgggaccagtctaggaactggcttcctggaccctgttaccgccagcagcgagtatcaaagacatctgcggataacaacaacagtgaatactcgtggactggagctaccaagtaccacctcaatggcagagactctctggtgaatccgggcccggccatggcaagccacaaggacgatgaagaaaagttttttcctcagagcggggttctcatctttgggaagcaaggctcagagaaaacaaatgtggacattgaaaaggtcatgattacagacgaagaggaaatcaggacaaccaatcccgtggctacggagcagtatggttctgtatctaccaacctccagagaggcaacagacaagcagctaccgcagatgtcaacacacaaggcgttcttccaggcatggtctggcaggacagagatgtgtaccttcaggggcccatctgggcaaagattccacacacggacggacattttcacccctctcccctcatgggtggattcggacttaaacaccctcctccacagattctcatcaagaacaccccggtacctgcgaatccttcgaccaccttcagtgcggcaaagtttgcttccttcatcacacagtactccacgggacaggtcagcgtggagatcgagtgggagctgcagaaggaaaacagcaaacgctggaatcccgaaattcagtacacttccaactacaacaagtctgttaatgtggactttactgtggacactaatggcgtgtattcagagcctcgccccattggcaccagatacctgactcgtaatctgtaa

SEQ ID NO: 2001 - DNA, 2208 bp, Artificial Sequence
  Synthetic Polynucleotide
atggctgccgatggttatcttccagattggctcgaggacactctctctgaaggaataagacagtggtggaagctcaaacctggcccaccaccaccaaagcccgcagagcggcataaggacgacagcaggggtcttgtgcttcctgggtacaagtacctcggacccttcaacggactcgacaagggagagccggtcaacgaggcagacgccgcggccctcgagcacgacaaagcctacgaccggcagctcgacagcggagacaacccgtacctcaagtacaaccacgccgacgcggagtttcaggagcgccttaaagaagatacgtcttttgggggcaacctcggacgagcagtcttccaggcgaaaaagagggttcttgaacctctgggcctggttgaggaacctgttaagacggctccgggaaaaaagaggccggtagagcactctcctgtggagccagactcctcctcgggaaccggaaaggcgggccagcagcctgcaagaaaaagattgaattttggtcagactggagacgcagactcagtacctgacccccagcctctcggacagccaccagcagccccctctggtctgggaactaatacgatggctacaggcagtggcgcaccaatggcagacaataacgagggcgccgacggagtgggtaattcctcgggaaattggcattgcgattccacatggatgggcgacagagtcatcaccaccagcacccgaacctgggccctgcccacctacaacaaccacctctacaaacaaatttccagccaatcaggagcctcgaacgacaatcactactttggctacagcaccccttgggggtattttgacttcaacagattccactgccacttttcaccacgtgactggcaaagactcatcaacaacaactggggattccgacccaagagactcaacttcaagctctttaacattcaagtcaaagaggtcacgcagaatgacggtacgacgacgattgccaataaccttaccagcacggttcaggtgtttactgactcggagtaccagctcccgtacgtcctcggctcggcgcatcaaggatgcctcccgccgttcccagcagacgtcttcatggtgccacagtatggatacctcaccctgaacaacgggagtcaggcagtaggacgctcttcattttactgcctggagtactttccttctcagatgctgcgtaccggaaacaactttaccttcagctacacttttgaggacgttcctttccacagcagctacgctcacagccagagtctggaccgtctcatgaatcctctcatcgaccagtacctgtattacttgagcagaacaaacactccaagtggaaccaccacgcagtcaaggcttcagttttctcaggccggagcgagtgacattcgggaccagtctaggaactggcttcctggaccctgttaccgccagcagcgagtatcaaagacatctgcggataacaacaacagtgaatactcgtggactggagctaccaagtaccacctcaatggcagagactctctggtgaatccgggcccggccatggcaagccacaaggacgatgaagaaaagttttttcctcagagcggggttcccatctttgggaagcaaggctcagagaaaacaaatgtggacattgaaaaggtcatgattacagacgaagaggaaatcaggacaaccaatcccgtggctacggagcagtatggttctgtatctaccaacctccagagaggcaacagacaagcagctaccgcagatgtcaacacacaaggcgttcttccaggcatggtctggcaggacagagatgtgtaccttcaggggcccatctgggcaaagattccacacacggacggacattttcacccctctcccctcatgggtggattcggacttaaacaccctcctccacagattctcatcaagaacaccccggtacctgcgaatccttcgaccaccttcagtgcggcaaagtttgcttccttcatcacacagtactccacgggacaggtcagcgtggagatcgagtgggagctgcagaaggaaaacagcaaacgctggaatcccgaaattcagtacacttccaactacaacaagtctgttaatgtggactttactgtggacactaatggcgtgtattcagagcctcgccccattggcaccagatacctgactcgtaatctgtaa

SEQ ID NO: 2002 - DNA, 2208 bp, Artificial Sequence
  Synthetic Polynucleotide
atggctgccgatggttatcttccagattggctcgaggacactctctctgaaggaataagacagtggtggaagctcaaacctggcccaccaccaccaaagcccgcagagcggcataaggacgacagcaggggtcttgtgcttcctgggtacaagtacctcggacccttcaacggactcgacaagggagagccggtcaacgaggcagacgccgcggccctcgagcacgacaaagcctacgaccggcagctcgacagcggagacaacccgtacctcaagtacaaccacgccgacgcggagtttcaggagcgccttaaagaagatacgtcttttgggggcaacctcggacgagcagtcttccaggcgaaaaagagggttcttgaacctctgggcctggttgaggaacctgttaagacggctccgggaaaaaagaggccggtagagcactctcctgtggagccagactcctcctcgggaaccggaaaggcgggccagcagcctgcaagaaaaagattgaattttggtcagactggagacgcagactcagtacctgacccccagcctctcggacagccaccagcagccccccctggtctgggaactaatacgatggctacaggcagtggcgcaccaatggcagacaataacgagggcgccgacggagtgggtaattcctcgggaaattggcattgcgattccacatggatgggcgacagagtcatcaccaccagcacccgaacctgggccctgcccacctacaacaaccacctctacaaacaaatttccagccaatcaggagcctcgaacgacaatcactactttggctacagcaccccttgggggtattttgacttcaacagattccactgccacttttcaccacgtgactggcaaagactcatcaacaacaactggggattccgacccaagagactcaacttcaagctctttaacattcaagtcaaagaggtcacgcagaatgacggtacgacgacgattgccaataaccttaccagcacggttcaggtgtttactgactcggagtaccagctcccgtacgtcctcggctcggcgcatcaaggatgcctcccgccgttcccagcagacgtcttcatggtgccacagtatggatacctcaccctgaacaacgggagtcaggcagtaggacgctcttcattttactgcctggagtactttccttctcagatgctgcgtaccggaaacaactttaccttcagctacacttttgaggacgttcctttccacagcagctacgctcacagccagagtctggaccgtctcatgaatcctctcatcgaccagtacctgtattacttgagcagaacaaacactccaagtggaaccaccacgcagtcaaggcttcagttttctcaggccggagcgagtgacattcgggaccagtctaggaactggcttcctggaccctgttaccgccagcagcgagtatcaaagacatctgcggataacaacaacagtgaatactcgtggactggagctaccaagtaccacctcaatggcagagactctctggtgaatccgggcccggccatggcaagccacaaggacgatgaagaaaagttttttcctcagagcggggttctcatctttgggaagcaaggctcagagaaaacaaatgtggacattgaaaaggtcatgattacagacgaagaggaaatcaggacaaccaatcccgtggctacggagcagtatggttctgtatctaccaacctccagagaggcaacagacaagcagctaccgcagatgtcaacacacaaggcgttcttccaggcatggtctggcaggacagagatgtgtaccttcaggggcccatctgggcaaagattccacacacggacggacattttcacccctctcccctcatgggtggattcggacttaaacaccctcctccacagattctcatcaagaacaccccggtacctgcgaatccttcgaccaccttcagtgcggcaaagtttgcttccttcatcacacagtactccacgggacaggtcagcgtggagatcgagtgggagctgcagaaggaaaacagcaaacgctggaatcccgaaattcagtacacttccaactacaacaagtctgttaatgtggactttactgtggacactaatggcgtgtattcagagcctcgccccattggcaccagatacctgactcgtaatctgtaa

SEQ ID NO: 2003 - DNA, 2208 bp, Artificial Sequence
  Synthetic Polynucleotide
atggctgccgatggttatcttccagattggctcgaggacactctctctgaaggaataagacagtggtggaagctcaaacctggcccaccaccaccaaagcccgcagagcggcataaggacgacagcaggggtcttgtgcttcctgggtacaagtacctcggacccttcaacggactcgacaagggagagccggtcaacgaggcagacgccgcggccctcgagcacgacaaagcctacgaccggcagctcgacagcggagacaacccgtacctcaagtacaaccacgccgacgcggagtttcaggagcgccttaaagaagatacgtcttttgggggcaacctcggacgagcagtcttccaggcgaaaaagagggttcttgaacctctgggcctggttgaggaacctgttaagacggctccgggaaaaaagaggccggtagagcactctcctgtggagccagactcctcctcgggaaccggaaaggcgggccagcagcctgcaagaaaaagattgaattttggtcagactggagacgcagactcagtacctgacccccagcctctcggacagccaccagcagccccctctggtctgggaactaatacgatggctacaggcagtggcgcaccaatggcagacaataacgagggcgccgacggagtgggtaattcctcgggaaattggcattgcgattccacatggatgggcgacagagtcatcaccaccagcacccgaacctgggccctgcccacctacaacaaccacctctacaaacaaatttccagccaatcaggagcctcgaacgacaatcactactttggctacagcaccccttgggggtattttgacttcaacagattccactgccacttttcaccacgtgactggcaaagactcatcaacaacaactggggattccgacccaagagactcaacttcaagctctttaacattcaagtcaaagaggtcacgcagaatgacggtacgacgacgattgccaataaccttaccagcacggttcaggtgtttactgactcggagtaccagctcccgtacgtcctcggctcggcgcatcaaggatgcctcccgccgttcccagcagacgtcttcatggtgccacagtatggatacctcaccctgaacaacgggagtcaggcagtaggacgctcttcattttactgcctggagtactttccttctcagatgctgcgtaccggaaacaactttaccttcagctacacttttgaggacgttcctttccacagcagctacgctcacagccagagtctggaccgtctcatgaatcctctcatcgaccagtacctgtattacttgagcagaacaaacactccaagtggaaccaccacgcagtcaaggcttcagttttctcaggccggagcgagtgacattcgggaccagtctaggaactggcttcctggaccctgttaccgccagcagcgagtatcaaagacatctgcggataacaacaacagtgaatactcgtggactggagctaccaagtaccacctcaatggcagagactctctggtgaatccgggcccggccatggcaagccacaaggacgatgaagaaaagttttttcctcagagcgggattctcatctttgggaagcaaggctcagagaaaacaaatgtggacattgaaaaggtcatgattacagacgaagaggaaatcaggacaaccaatcccgtggctacggagcagtatggttctgtatctaccaacctccagagaggcaacagacaagcagctaccgcagatgtcaacacacaaggcgttcttccaggcatggtctggcaggacagagatgtgtaccttcaggggcccatctgggcaaagattccacacacggacggacattttcacccctctcccctcatgggtggattcggacttaaacaccctcctccacagattctcatcaagaacaccccggtacctgcgaatccttcgaccaccttcagtgcggcaaagtttgcttccttcatcacacagtactccacgggacaggtcagcgtggagatcgagtgggagctgcagaaggaaaacagcaaacgctggaatcccgaaattcagtacacttccaactacaacaagtctgttaatgtggactttactgtggacactaatggcgtgtattcagagcctcgccccattggcaccagatacctgactcgtaatctgtaa

SEQ ID NO: 2004 - DNA, 2208 bp, Artificial Sequence
  Synthetic Polynucleotide
atggctgccgatggttatcttccagattggctcgaggacactctctctgaaggaataagacagtggtggaagctcaaacctggcccaccaccaccaaagcccgcagagcggcataaggacgacagcaggggtcttgtgcttcctgggtacaagtacctcggacccttcaacggactcgacaagggagagccggtcaacgaggcagacgccgcggccctcgagcacgacaaagcctacgaccggcagctcgacagcggagacaacccgtacctcaagtacaaccacgccgacgcggagtttcaggagcgccttaaagaagatacgtcttttgggggcaacctcggacgagcagtcttccaggcgaaaaagagggttcttgaacctctgggcctggttgaggaacctgttaagacggctccgggaaaaaagaggccggtagagcactctcctgtggagccagactcctcctcgggaaccggaaaggcgggccagcagcctgcaagaaaaagattgaattttggtcagactggagacgcagactcagtacctgacccccagcctctcggacagccaccagcagccccctctggtctgggaactaatacgatggctacaggcagtggcgcaccaatggcagacaataacgagggcgccgacggagtgggtaattcctcgggaaattggcattgcgattccacatggatgggcgacagagtcatcaccaccagcacccgaacctgggccctgcccacctacaacaaccacctctacaaacaaatttccagccaatcaggagcctcgaacgacaatcactactttggctacagcaccccttgggggtattttgacttcaacagattccactgccacttttcaccacgtgactggcaaagactcatcaacaacaactggggattccgacccaagagactcaacttcaagctctttaacattcaagtcaaagaggtcacgcagaatgacggtacgacgacgattgccaataaccttaccagcacggttcaggtgtttactgactcggagtaccagctcccgtacgtcctcggctcggcgcatcaaggatgcctcccgccgttcccagcagacgtcttcatggtgccacagtatggatacctcaccctgaacaacgggagtcaggcagtaggacgctcttcattttactgcctggagtactttccttctcagatgctgcgtaccggaaacaactttaccttcagctacacttttgaggacgttcctttccacagcagctacgctcacagccagagtctggaccgtctcatgaatcctctcatcgaccagtacctgtattacttgagcagaacaaacactccaagtggaaccaccacgcagtcaaggcttcagttttctcaggccggagcgagtgacattcgggaccagtctaggaactggcttcctggaccctgttaccgccagcagcgagtatcaaagacatctgcggataacaacaacagtgaatactcgtggactggagctaccaagtaccacctcaatggcagagactctctggtgaatccgggcccggccatggcaagccacaaggacgatgaagaaaagttttttcctcagagcggggttctcatctttgggaagcaaggctcagagaaaacaaatgtggacattgaaaaggtcatgattacagacgaagaggaaatcaggacaaccaatcccgtggctacggagcagtatggttctgtatctaccaacctccagagaggcaacagacaagcagctaccgcagatgtcaacacacaaggcgttcttccaggcatggtctggcaggacagagatgtgtaccttcaggggcccatctgggcaaagattccacacacggacggacattttcacccctctcccctcatgggtggattcggacttaaacaccctcctccacagattctcatcaagaacaccccggtacctgcgaatccttcgaccaccttcagtgcggcaaagtttgcttccttcatcacacagtactccacgggacaggtcagcgtggagatcgagtgggagctgcagaaggaaaacagcaaacgctggaatcccgaaattcagtgcacttccaactacaacaagtctgttaatgtggactttactgtggacactaatggcgtgtattcagagcctcgccccattggcaccagatacctgactcgtaatctgtaa

SEQ ID NO: 2005 - DNA, 2208 bp, Artificial Sequence
  Synthetic Polynucleotide
atggctgccgatggttatcttccagattggctcgaggacactctctctgaaggaataagacagtggtggaagctcaaacctggcccaccaccaccaaagcccgcagagcggcataaggacgacagcaggggtcttgtgcttcctgggtacaagtacctcggacccttcaacggactcgacaagggagagccggtcaacgaggcagacgccgcggccctcgagcacgacaaagcctacgaccggcagctcgacagcggagacaacccgtacctcaagtacaaccacgccgacgcggagtttcaggagcgccttaaagaagatacgtcttttgggggcaacctcggacgagcagtcttccaggcgaaaaagagggttcttgaacctctgggcctggttgaggaacctgttaagacggctccgggaaaaaagaggccggtagagcactctcctgtggagccagactcctcctcgggaaccggaaaggcgggccagcagcctgcaagaaaaagattgaattttggtcagactggagacgcagactcagtacctgacccccagcctctcggacagccaccagcagccccctctggtctgggaactaatacgatggctacaggcagtggcgcaccaatggcagacaataacgagggcgccgacggagtgggtaattcctcgggaaattggcattgcgattccacatggatgggcgacagagtcatcaccaccagcacccgaacctgggccctgcccacctacaacaaccacctctacaaacaaatttccagccaatcaggagcctcgaacgacaatcactactttggctacagcaccccttgggggtattttgacttcaacagattccactgccacttttcaccacgcgactggcaaagactcatcaacaacaactggggattccgacccaagagactcaacttcaagctctttaacattcaagtcaaagaggtcacgcagaatgacggtacgacgacgattgccaataaccttaccagcacggttcaggtgtttactgactcggagtaccagctcccgtacgtcctcggctcggcgcatcaaggatgcctcccgccgttcccagcagacgtcttcatggtgccacagtatggatacctcaccctgaacaacgggagtcaggcagtaggacgctcttcattttactgcctggagtactttccttctcagatgctgcgtaccggaaacaactttaccttcagctacacttttgaggacgttcctttccacagcagctacgctcacagccagagtctggaccgtctcatgaatcctctcatcgaccagtacctgtattacttgagcagaacaaacactccaagtggaaccaccacgcagtcaaggcttcagttttctcaggccggagcgagtgacattcgggaccagtctaggaactggcttcctggaccctgttaccgccagcagcgagtatcaaagacatctgcggataacaacaacagtgaatactcgtggactggagctaccaagtaccacctcaatggcagagactctctggtgaatccgggcccggccatggcaagccacaaggacgatgaagaaaagttttttcctcagagcggggttctcatctttgggaagcaaggctcagagaaaacaaatgtggacattgaaaaggtcatgattacagacgaagaggaaatcaggacaaccaatcccgtggctacggagcagtatggttctgtatctaccaacctccagagaggcaacagacaagcagctaccgcagatgtcaacacacaaggcgttcttccaggcatggtctggcaggacagagatgtgtaccttcaggggcccatctgggcaaagattccacacacggacggacattttcacccctctcccctcatgggtggattcggacttaaacaccctcctccacagattctcatcaagaacaccccggtacctgcgaatccttcgaccaccttcagtgcggcaaagtttgcttccttcatcacacggtactccacgggacaggtcagcgtggagatcgagtgggagctgcagaaggaaaacagcaaacgctggaatcccgaaattcagtacacttccaactacaacaagtctgttaatgtggactttactgtggacactaatggcgtgtattcagagcctcgccccattggcaccagatacctgactcgtaatctgtaa

SEQ ID NO: 2006 - DNA, 2208 bp, Artificial Sequence
  Synthetic Polynucleotide
atggctgccgatggttatcttccagattggctcgaggacactctctctgaaggaataagacagtggtggaagctcaaacctggcccaccaccaccaaagcccgcagagcggcataaggacgacagcaggggtcttgtgcttcctgggtacaagtacctcggacccttcaacggactcgacaagggagagccggtcaacgaggcagacgccgcggccctcgagcacgacaaagcctacgaccggcagctcgacagcggagacaacccgtacctcaagtacaaccacgccgacgcggagtttcgggagcgccttaaagaagatacgtcttttgggggcaacctcggacgagcagtcttccaggcgaaaaagagggttcttgaacctctgggcctggttgaggaacctgttaagacggctccgggaaaaaagaggccggtagagcactctcctgtggagccagactcctcctcgggaaccggaaaggcgggccagcagcctgcaagaaaaagattgaattttggtcagactggagacgcagactcagtacctgacccccagcctctcggacagccaccagcagccccctctggtctgggaactaatacgatggctacaggcagtggcgcaccaatggcagacaataacgagggcgccgacggagtgggtaattcctcgggaaattggcattgcgattccacatggatgggcgacagagtcatcaccaccagcacccgaacctgggccctgcccacctacaacaaccacctctacaaacaaatttccagccaatcaggagcctcgaacgacaatcactactttggctacagcaccccttgggggtattttgacttcaacagattccactgccacttttcaccacgtgactggcaaagactcatcaacaacaactggggattccgacccaagagactcaacttcaagctctttaacattcaagtcaaagaggtcacgcagaatgacggtacgacgacgattgccaataaccttaccagcacggttcaggtgtttactgactcggagtaccagctcccgtacgtcctcggctcggcgcatcaaggatgcctcccgccgttcccagcagacgtcttcatggtgccacagtatggatacctcaccctgaacaacgggagtcaggcagtaggacgctcttcattttactgcctggagtactttccttctcagatgctgcgtaccggaaacaactttaccttcagctacacttttgaggacgttcctttccacagcagctacgctcacagccagagtctggaccgtctcatgaatcctctcatcgaccagtacctgtattacttgagcagaacaaacactccaagtggaaccaccacgcagtcaaggcttcagttttctcaggccggagcgagtgacattcgggaccagtctaggaactggcttcctggaccctgttaccgccagcagcgagtatcaaagacatctgcggataacaacaacagtgaatactcgtggactggagctaccaagtaccacctcaatggcagagactctctggtgaatccgggcccggccatggcaagccacaaggacgatgaagaaaagttttttcctcagagcggggttctcatctttgggaagcaaggctcagagaaaacaaatgtggacattgaaaaggtcatgattacagacgaagaggaaatcaggacaaccaatcccgtggctacggagcagtatggttctgtatctaccaacctccagagaggcaacagacaagcagctaccgcagatgtcaacacacaaggcgttcttccaggcatggtctggcaggacagagatgtgtaccttcaggggcccatctgggcaaagattccacacacggacggacattttcacccctctcccctcatgggtggattcggacttaaacaccctcctccacagattctcatcaagaacaccccggtacctgcgaatccttcgaccaccttcagtgcggcaaagtttgcttccttcatcacacagtactccacgggacaggtcagcgtggagatcgagtgggagctgcagaaggaaaacagcaaacgctggaatcccgaaattcagtacacttccaactacaacaagtctgttaatgtggactttactgtggacactaatggcgtgtattcagagcctcgccccattggcaccagatacctgactcgtaatctgtaa

SEQ ID NO: 2007 - DNA, 2208 bp, Artificial Sequence
  Synthetic Polynucleotide
atggctgccgatggttatcttccagattggctcgaggacactctctctgaaggaataagacagtggtggaagctcaaacctggcccaccaccaccaaagcccgcagagcggcataaggacgacagcaggggtcttgtgcttcctgggtacaagtacctcggacccttcaacggactcgacaagggagagccggtcaacgaggcagacgccgcggccctcgagcacgacaaagcctacgaccggcagctcgacagcggagacaacccgtacctcaagcacaaccacgccgacgcggagtttcaggagcgccttaaagaagatacgtcttttgggggcaacctcggacgagcagtcttccaggcgaaaaagagggttcttgaacctctgggcctggttgaggaacctgttaagacggctccgggaaaaaagaggccggtagagcactctcctgtggagccagactcctcctcgggaaccggaaaggcgggccagcagcctgcaagaaaaagattgaattttggtcagactggagacgcagactcagtacctgacccccagcctctcggacagccaccagcagccccctctggtctgggaactaatacgatggctacaggcagtggcgcaccaatggcagacaataacgagggcgccgacggagtgggtaattcctcgggaaattggcattgcgattccacatggatgggcgacagagtcatcaccaccagcacccgaacctgggccctgcccacctacaacaaccacctctacaaacaaatttccagccaatcaggagcctcgaacgacaatcactactttggctacagcaccccttgggggtattttgacttcaacagattccactgccacttttcaccacgtgactggcaaagactcatcaacaacaactggggattccgacccaagagactcaacttcaagctctttaacattcaagtcaaagaggtcacgcagaatgacggtacgacgacgattgccaataaccttaccagcacggttcaggtgtttactgactcggagtaccagctcccgtacgtcctcggctcggcgcatcaaggatgcctcccgccgttcccagcagacgtcttcatggtgccacagtatggatacctcaccctgaacaacgggagtcaggcagtaggacgctcttcattttactgcctggagtactttccttctcagatgctgcgtaccggaaacaactttaccttcagctacacttttgaggacgttcctttccacagcagctacgctcacagccagagtctggaccgtctcatgaatcctctcatcgaccagtacctgtattacttgagcagaacaaacactccaagtggaaccaccacgcagtcaaggcttcagttttctcaggccggagcgagtgacattcgggaccagtctaggaactggcttcctggaccctgttaccgccagcagcgagtatcaaagacatctgcggataacaacaacagtgaatactcgtggactggagctaccaagtaccacctcaatggcagagactctctggtgaatccgggcccggccatggcaagccacaaggacgatgaagaaaagttttttcctcagagcggggttctcatctttgggaagcaaggctcagagaaaacaaatgtggacattgaaaaggtcatgattacagacgaagaggaaatcaggacaaccaatcccgtggctacggagcagtatggttctgtatctaccaacctccagagaggcaacagacaagcagctaccgcagatgtcaacacacaaggcgttcttccaggcatggtctggcaggacagagatgtgtaccttcaggggcccatctgggcaaagattccacacacggacggacattttcacccctctcccctcatgggtggattcggacttaaacaccctcctccacagattctcatcaagaacaccccggtacctgcgaatccttcgaccaccttcagtgcggcaaagtttgcttccttcatcacacagtactccacgggacaggtcagcgtggagatcgagtgggagctgcagaaggaaaacagcaaacgctggaatcccgaaattcagtacacttccaactacaacaagtctgttaatgtggactttactgtggacactaatggcgtgtattcagagcctcgccccattggcaccagatacctgactcgtaatctgtaa

SEQ ID NO: 2008 - DNA, 2208 bp, Artificial Sequence
  Synthetic Polynucleotide
atggctgccgatggttatcttccagattggctcgaggacactctctctgaaggaataagacagtggtggaagctcaaacctggcccaccaccaccaaagcccgcagagcggcataaggacgacagcaggggtcttgtgcttcctgggtacaagtacctcggacccttcaacggactcgacaagggagagccggtcaacgaggcagacgccgcggccctcgagcacgacaaagcctacgaccggcagctcgacagcggagacaacccgtacctcaagtacaaccacgccgacgcggagtttcaggagcgccttaaagaagatacgtcttttgggggcaacctcggacgagcagtcttccaggcgaaaaagagggttcttgaacctctgggcctggttgaggaacctgttaagacggctccgggaaaaaagaggccggtagagcactctcctgtggagccagactcctcctcgggaaccggaaaggcgggccagcagcctgcaagaaaaagattgaattttggtcagactggagacgcagactcagtacctgacccccagcctctcggacagccaccagcagccccctctggtctgggaactaatacgatggctacaggcagtggcgcaccaatggcagacaataacgagggcgccgacggagtgggtaattcctcgggaaattggcattgcgattccacatggatgggcgacagagtcatcaccaccagcacccgaacctgggccctgcccacctacaacaaccacctctacaaacaaatttccagccaatcaggagcctcgaacgacaatcactactttggctacagcaccccttgggggtattttgacttcaacagattccactgccacttttcaccacgtgactggcaaagactcatcaacaacaactggggattccgacccaagagactcaacttcaagctctttaacattcaagtcaaagaggtcacgcagaatgacggtacgacgacgattgccaataaccttaccagcacggttcaggtgtttactgactcggagtaccagctcccgtacgtcctcggctcggcgcatcaaggatgcctcccgccgttcccagcagacgtcttcatggtgccacagtatggatacctcaccctgaacaacgggagtcgggcagtaggacgctcttcattttactgcctggagtactttccttctcagatgctgcgtaccggaaacaactttaccttcagctacacttttgaggacgttcctttccacagcagctacgctcacagccagagtctggaccgtctcatgaatcctctcatcgaccagtacctgtattacttgagcagaacaaacactccaagtggaaccaccacgcagtcaaggcttcagttttctcaggccggagcgagtgacattcgggaccagtctaggaactggcttcctggaccctgttaccgccagcagcgagtatcaaagacatctgcggataacaacaacagtgaatactcgtggactggagctaccaagtaccacctcaatggcagagactctctggtgaatccgggcccggccatggcaagccacaaggacgatgaagaaaagttttttcctcagagcggggttctcatctttgggaagcaaggctcagagaaaacaaatgtggacattgaaaaggtcatgattacagacgaagaggaaatcaggacaaccaatcccgtggctacggagcagtatggttctgtatctaccaacctccagagaggcaacagacaagcagctaccgcagatgtcaacacacaaggcgttcttccaggcatggtctggcaggacagagatgtgtaccttcaggggcccatctgggcaaagattccacacacggacggacattttcacccctctcccctcatgggtggattcggacttaaacaccctcctccacagattctcatcaagaacaccccggtacctgcgaatccttcgaccaccttcagtgcggcaaagtttgcttccttcatcacacagtactccacgggacaggtcagcgtggagatcgagtgggagctgcagaaggaaaacagcaaacgctggaatcccgaaattcagtacacttccaactacaacaagtctgttaatgtggactttactgtggacactaatggcgtgtattcagagcctcgccccattggcaccagatacctgactcgtaatctgtaa

SEQ ID NO: 2009 - DNA, 2208 bp, Artificial Sequence
  Synthetic Polynucleotide
atggctgccgatggttatcttccagattggctcgaggacactctctctgaaggaataagacagtggtggaagctcaaacctggcccaccaccaccaaagcccgcagagcggcataaggacgacagcaggggtcttgtgcttcctgggtacaagtacctcggacccttcaacggactcgacaagggagagccggtcaacgaggcagacgccgcggccctcgagcacgacaaagcctacgaccggcagctcgacagcggagacaacccgtacctcaagtacaaccacgccgacgcggagtttcaggagcgccttaaagaagatacgtcttttgggggcaacctcggacgagcagtcttccaggcgaaaaagagggttcttgaacctctgggcctggttgaggaacctgttaagacggctccgggaaaaaagaggccggtagagcactctcctgtggagccagactcctcctcgggaaccggaaaggcgggccagcagcctgcaagaaaaagattgaattttggtcagactggagacgcagactcagtacctgacccccagcctctcggacagccaccagcagccccctctggtctgggaactaatacgatggctacaggcagtggcgcaccaatggcagacaataacgagggcgccgacggagtgggtaattcctcgggaaattggcattgcgattccacatggatgggcgacagagtcatcaccaccagcacccgaacctgggccctgcccacctacaacaaccacctctacaaacaaatttccagccaatcaggagcctcgaacgacaatcactactttggctacagcaccccttgggggtattttgacttcaacagattccactgccacttttcaccacgtgactggcaaagactcatcaacaacaactggggattccgacccaagagactcaacttcaagctctttaacattcaagtcaaagaggtcacgcagaatgacggtacgacgacgattgccaataaccttaccagcacggttcaggtgtttactgactcggagtaccagctcccgtacgtcctcggctcggcgcatcaaggatgcctcccgccgttcccagcagacgtcttcatggtgccacagtatggatacctcaccctgaacaacgggagtcaggcagtaggacgctcttcattttactgcctggagtactttccttctcagatgctgcgtaccggaaacaactttaccttcagctacacttttgaggacgttcctttccacagcagctacgctcacagccagagtctggaccgtctcatgaatcctctcatcgaccagtacctgtattacttgagcagaacaaacactccaagtggaaccaccacgcagtcaaggcttcagttttctcaggccggagcgagtgacattcgggaccagtctaggaactggcttcctggaccctgttaccgccagcagcgagtatcaaagacatctgcggataacaacaacagtgaatactcgtggactggagctaccaagtaccacctcaatggcagagactctctggtgaatccgggcccggccatggcaagccacaaggacgatgaagaaaagttttttcctcagagcggggttctcatctttgggaagcaaggctcagagaaaacaaatgtggacattgaaaaggtcgtgattacagacgaagaggaaatcaggacaaccaatcccgtggctacggagcagtatggttctgtatctaccaacctccagagaggcaacagacaagcagctaccgcagatgtcaacacacaaggcgttcttccaggcatggtctggcaggacagagatgtgtaccttcaggggcccatctgggcaaagattccacacacggacggacattttcacccctctcccctcatgggtggattcggacttaaacaccctcctccacagattctcatcaagaacaccccggtacctgcgaatccttcgaccaccttcagtgcggcaaagtttgcttccttcatcacacagtactccacgggacaggtcagcgtggagatcgagtgggagctgcagaaggaaaacagcaaacgctggaatcccgaaattcagtacacttccaactacaacaagtctgttaatgtggactttactgtggacactaatggcgtgtattcagagcctcgccccattggcaccagatacctgactcgtaatctgtaa

SEQ ID NO: 2010 - DNA, 2208 bp, Artificial Sequence
  Synthetic Polynucleotide
atggctgccgatggttatcttccagattggctcgaggacactctctctgaaggaataagacagtggtggaagctcaaacctggcccaccaccaccaaagcccgcagagcggcataaggacgacagcaggggtcttgtgcttcctgggtacaagtacctcggacccttcaacggactcgacaagggagagccggtcaacgaggcagacgccgcggccctcgagcacgacaaagcctacgaccggcagctcgacagcggagacaacccgtacctcaagtacaaccacgccgacgcggagtttcaggagcgccttaaagaagatacgtcttttgggggcaacctcggacgagcagtcttccaggcgaaaaagagggttcttgaacctctgggcctggttgaggaacctgttaagacggctccgggaaaaaagaggccggtagagcactctcctgtggagccagactcctcctcgggaaccggaaaggcgggccagcagcctgcaagaaaaagattgaattttggtcagactggagacgcagactcagtacctgacccccagcctctcggacagccaccagcagccccctctggtctgggaactaatacgatggctacaggcagtggcgcaccaatggcagacaataacgagggcgccgacggagtgggtaattcctcgggaaattggcattgcgattccacatggatgggcgacagagtcatcaccaccagcacccgaacctgggccctgcccacctacaacaaccacctctacaaacaaatttccagccaatcaggagcctcgaacgacaatcactactttggctacagcaccccttgggggtattttgacttcaacagattccactgccacttttcaccacgtgactggcaaagactcatcaacaacaactggggattccgacccaagagactcaacttcaagctctttaacattcaagtcaaagaggtcacgcagaatgacggtacgacgacgattgccaataaccttaccagcacggttcaggtgtttactgactcggagtaccagctcccgtacgtcctcggctcggcgcatcaaggatgcctcccgccgttcccagcagacgtcttcatggtgccacagtatggatacctcaccctgaacaacgggagtcaggcagtaggacgctcttcattttactgcctggagtactttccttctcagatgctgcgtaccggaaacaactttaccttcagccacacttttgaggacgttcctttccacagcagctacgctcacagccagagtctggaccgtctcatgaatcctctcatcgaccagtacctgtattacttgagcagaacaaacactccaagtggaaccaccacgcagtcaaggcttcagttttctcaggccggagcgagtgacattcgggaccagtctaggaactggcttcctggaccctgttaccgccagcagcgagtatcaaagacatctgcggataacaacaacagtgaatactcgtggactggagctaccaagtaccacctcaatggcagagactctctggtgaatccgggcccggccatggcaagccacaaggacgatgaagaaaagttttttcctcagagcggggttctcatctttgggaagcaaggctcagagaaaacaaatgtggacattgaaaaggtcatgattacagacgaagaggaaatcaggacaaccaatcccgtggctacggagcagtatggttctgtatctaccaacctccagagaggcaacagacaagcagctaccgcagatgtcaacacacaaggcgttcttccaggcatggtctggcaggacagagatgtgtaccttcaggggcccatctgggcaaagattccacacacggacggacattttcacccctctcccctcatgggtggattcggacttaaacaccctcctccacagattctcatcaagaacaccccggtacctgcgaatccttcgaccaccttcagtgcggcaaagtttgcttccttcatcacacagtactccacgggacaggtcagcgtggagatcgagtgggagctgcagaaggaaaacagcaaacgctggaatcccgaaattcagtacacttccaactacaacaagtctgttaatgtggactttactgtggacactaatggcgtgtattcagagcctcgccccattggcaccagatacctgactcgtaatctgtaa

SEQ ID NO: 2011 - DNA, 2208 bp, Artificial Sequence
  Synthetic Polynucleotide
atggctgccgatggttatcttccagattggctcgaggacactctctctgaaggaataagacagtggtggaagctcaaacctggcccaccaccaccaaagcccgcagagcggcataaggacgacagcaggggtcttgtgcttcctgggtacaagtacctcggacccttcaacggactcgacaagggagagccggtcaacgaggcagacgccgcggccctcgagcacgacaaagcctacgaccggcagctcgacagcggagacaacccgtacctcaagtacaaccacgccgacgcggagtttcaggagcgccttaaagaagatacgtcttttgggggcaacctcggacgagcagtcttccaggcgaaaaagagggttcttgaacctctgggcctggttgaggaacctgttaagacggctccgggaaaaaagaggccggtagagcactctcctgtggagccagactcctcctcgggaaccggaaaggcgggccagcagcctgcaagaaaaagattgaattttggtcagactggagacgcagactcagtacctgacccccagcctctcggacagccaccagcagccccctctggtctgggaactaatacgatggctacaggcagtggcgcaccaatggcagacaataacgagggcgccgacggagtgggtaattcctcgggaaattggcattgcgattccacatggatgggcggcagagtcatcaccaccagcacccgaacctgggccctgcccacctacaacaaccacctctacaaacaaatttccagccaatcaggagcctcgaacgacaatcactactttggctacagcaccccttgggggtattttgacttcaacagattccactgccacttttcaccacgtgactggcaaagactcatcaacaacaactggggattccgacccaagagactcaacttcaagctctttaacattcaagtcaaagaggtcacgcagaatgacggtacgacgacgattgccaataaccttaccagcacggttcaggtgtttactgactcggagtaccagctcccgtacgtcctcggctcggcgcatcaaggatgcctcccgccgttcccagcagacgtcttcatggtgccacagtatggatacctcaccctgaacaacgggagtcaggcagtaggacgctcttcattttactgcctggagtactttccttctcagatgctgcgtaccggaaacaactttaccttcagctacacttttgaggacgttcctttccacagcagctacgctcacagccagagtctggaccgtctcatgaatcctctcatcgaccagtacctgtattacttgagcagaacaaacactccaagtggaaccaccacgcagtcaaggcttcagttttctcaggccggagcgagtgacattcgggaccagtctaggaactggcttcctggaccctgttaccgccagcagcgagtatcaaagacatctgcggataacaacaacagtgaatactcgtggactggagctaccaagtaccacctcaatggcagagactctctggtgaatccgggcccggccatggcaagccacaaggacgatgaagaaaagttttttcctcagagcggggttctcatctttgggaagcaaggctcagagaaaacaaatgtggacattgaaaaggtcatgattacagacgaagaggaaatcaggacaaccaatcccgtggctacggagcagtatggttctgtatctaccaacctccagagaggcaacagacaagcagctaccgcagatgtcaacacacaaggcgttcttccaggcatggtctggcaggacagagatgtgtaccttcaggggcccatctgggcaaagattccacacacggacggacattttcacccctctcccctcatgggtggattcggacttaaacaccctcctccacagattctcatcaagaacaccccggtacctgcgaatccttcgaccaccttcagtgcggcaaagtttgcttccttcatcacacagtactccacgggacaggtcagcgtggagatcgagtgggagctgcagaaggaaaacagcaaacgctggaatcccgaaattcagtacacttccaactacaacaagtctgttaatgtggactttactgtggacactaatggcgtgtattcagagcctcgccccattggcaccagatacctgactcgtaatctgtaa

SEQ ID NO: 2012 - DNA, 2208 bp, Artificial Sequence
  Synthetic Polynucleotide
atggctgccgatggttatcttccagattggctcgaggacactctctctgaaggaataagacagtggtggaagctcaaacctggcccaccaccaccaaagcccgcagagcggcataaggacgacagcaggggtcttgtgcttcctgggtacaagtacctcggacccttcaacggactcgacaagggagagccggtcaacgaggcagacgccgcggccctcgagcacgacaaagcctacgaccggcagctcgacagcggagacaacccgtacctcaagtacaaccacgccgacgcggagtttcaggagcgccttaaagaagatacgtcttttgggggcaacctcggacgagcagtcttccaggcgaaaaagagggttcttgaacctctgggcctggttgaggaacctgttaagacggctccgggaaaaaagaggccggtagagcactctcctgtggagccagactcctcctcgggaaccggaaaggcgggccagcagcctgcaagaaaaagattgaattttggtcagactggagacgcagactcagtacctgacccccagcctctcggacagccaccagcagccccctctggtctgggaactaatacgatggctacaggcagtggcgcaccaatggcagacaataacgagggcgccgacggagtgggtaattcctcgggaaattggcattgcgattccacatggatgggcgacagagtcatcaccaccagcacccgaacctgggccctgcccacctacaacaaccacctctacaaacaaatttccagccaatcaggagcctcgaacgacaatcactactttggctacagcaccccttgggggtattttgacttcaacagattccactgccacttttcaccacgtgactggcaaagactcatcaacaacaactggggattccgacccaagagacccaacttcaagctctttaacattcaagtcaaagaggtcacgcagaatgacggtacgacgacgattgccaataaccttaccagcacggttcaggtgtttactgactcggagtaccagctcccgtacgtcctcggctcggcgcatcaaggatgcctcccgccgttcccagcagacgtcttcatggtgccacagtatggatacctcaccctgaacaacgggagtcaggcagtaggacgctcttcattttactgcctggagtactttccttctcagatgctgcgtaccggaaacaactttaccttcagctacacttttgaggacgttcctttccacagcagctacgctcacagccagagtctggaccgtctcatgaatcctctcatcgaccagtacctgtattacttgagcagaacaaacactccaagtggaaccaccacgcagtcaaggcttcagttttctcaggccggagcgagtgacattcgggaccagtctaggaactggcttcctggaccctgttaccgccagcagcgagtatcaaagacatctgcggataacaacaacagtgaatactcgtggactggagctaccaagtaccacctcaatggcagagactctctggtgaatccgggcccggccatggcaagccacaaggacgatgaagaaaagttttttcctcagagcggggttctcatctttgggaagcaaggctcagagaaaacaaatgtggacattgaaaaggtcatgactacagacgaagaggaaatcaggacaaccaatcccgtggctacggagcagtatggttctgtatctaccaacctccagagaggcaacagacaagcagctaccgcagatgtcaacacacaaggcgttcttccaggcatggtctggcaggacagagatgtgtaccttcaggggcccatctgggcaaagattccacacacggacggacattttcacccctctcccctcatgggtggattcggacttaaacaccctcctccacagattctcatcaagaacaccccggtacctgcgaatccttcgaccaccttcagtgcggcaaagtttgcttccttcatcacacagtactccacgggacaggtcagcgtggagatcgagtgggagctgcagaaggaaaacagcaaacgctggaatcccgaaattcagtacacttccaactacaacaagtctgttaatgtggactttactgtggacactaatggcgtgtattcagagcctcgccccattggcaccagatacctgactcgtaatctgtaa

SEQ ID NO: 2013 - DNA, 2208 bp, Artificial Sequence
  Synthetic Polynucleotide
atggctgccgatggttatcttccagattggctcgaggacactctctctgaaggaataagacagtggtggaagctcaaacctggcccaccaccaccaaagcccgcagagcggcataaggacgacagcaggggtcttgtgcttcctgggtacaagtacctcggacccttcaacggactcgacaagggagagccggtcaacgaggcagacgccgcggccctcgagcacgacaaagcctacgaccggcagctcgacagcggagacaacccgtacctcaagtacaaccacgccgacgcggagtttcgggagcgccttaaagaagatacgtcttttgggggcaacctcggacgagcagtcttccaggcgaaaaagagggttcttgaacctctgggcctggttgaggaacctgttaagacggctccgggaaaaaagaggccggtagagcactctcctgtggagccagactcctcctcgggaaccggaaaggcgggccagcagcctgcaagaaaaagattgaattttggtcagactggagacgcagactcagtacctgacccccagcctctcggacagccaccagcagccccctctggtctgggaactaatacgatggctacaggcagtggcgcaccaatggcagacaataacgagggcgccgacggagtgggtaattcctcgggaaattggcattgcgattccacatggatgggcgacagagtcatcaccaccagcacccgaacctgggccctgcccacctacaacaaccacctctacaaacaaatttccagccaatcaggagcctcgaacgacaatcactactttggctacagcaccccttgggggtattttgacttcaacagattccactgccacttttcaccacgtgactggcaaagactcatcaacaacaactggggattccgacccaagagactcaacttcaagctctttaacattcaagtcaaagaggtcacgcagaatgacggtacgacgacgattgccaataaccttaccagcacggttcaggtgtttactgactcggagtaccagctcccgtacgtcctcggctcggcgcatcaaggatgcctcccgccgttcccagcagacgtcttcatggtgccacagtatggatacctcaccctgaacaacgggagtcaggcagtaggacgctcttcattttactgcctggagtactttccttctcagatgctgcgtaccggaaacaactttaccttcagctacacttttgaggacgttcctttccacagcagctacgctcacagccagagtctggaccgtctcatgaatcctctcatcgaccagtacctgtattacttgagcagaacaaacactccaagtggaaccaccacgcagtcaaggcttcagttttctcaggccggagcgagtgacattcgggaccagtctaggaactggcttcctggaccctgttaccgccagcagcgagtatcaaagacatctgcggataacaacaacagtgaatactcgtggactggagctaccaagtaccacctcaatggcagagactctctggtgaatccgggcccggccatggcaagccacaaggacgatgaagaaaagttttttcctcagagcggggttctcatctttgggaagcaaggctcagagaaaacaaatgtggacattgaaaaggtcatgactacagacgaagaggaaatcaggacaaccaatcccgtggctacggagcagtatggttctgtatctaccaacctccagagaggcaacagacaagcagctaccgcagatgtcaacacacaaggcgttcttccaggcatggtctggcaggacagagatgtgtaccttcaggggcccatctgggcaaagattccacacacggacggacattttcacccctctcccctcatgggtggattcggacttaaacaccctcctccacagattctcatcaagaacaccccggtacctgcgaatccttcgaccaccttcagtgcggcaaagtttgcttccttcatcacacagtactccacgggacaggtcagcgtggagatcgagtgggagctgcagaaggaaaacagcaaacgctggaatcccgaaattcagtacacttccaactacaacaagtctgttaatgtggactttactgtggacactaatggcgtgtattcagagcctcgccccattggcaccagatacctgactcgtaatctgtaa

SEQ ID NO: 2014 - DNA, 2208 bp, Artificial Sequence
  Synthetic Polynucleotide
atggctgccgatggttatcttccagattggctcgaggacactctctctgaaggaataagacagtggtggaagctcaaacctggcccaccaccaccaaagcccgcagagcggcataaggacgacagcaggggtcttgtgcttcctgggtacaagtacctcggacccttcaacggactcgacaagggagagccggtcaacgaggcagacgccgcggccctcgagcacgacaaagcctacgaccggcagctcgacagcggagacaacccgtacctcaagtacaaccacgccgacgcggagtttcaggagcgccttaaagaagatacgtcttttgggggcaacctcggacgagcagtcttccaggcgaaaaagagggttcttgaacctctgggcctggttgaggaacctgttaagacggctccgggaaaaaagaggccggtagagcactctcctgtggagccagacccctcctcgggaaccggaaaggcgggccagcagcctgcaagaaaaagattgaattttggtcagactggagacgcagactcagtacctgacccccagcctctcggacagccaccagcagccccctctggtctgggaactaatacgatggctacaggcagtggcgcaccaatggcagacaataacgagggcgccgacggagtgggtaattcctcgggaaattggcattgcgattccacatggatgggcgacagagtcatcaccaccagcacccgaacctgggccctgcccacctacaacaaccacctctacaaacaaatttccagccaatcaggagcctcgaacgacaatcactactttggctacagcaccccttgggggtattttgacttcaacagattccactgccacttttcaccacgtgactggcaaagactcatcaacaacaactggggattccgacccaagagactcaacttcaagctctttaacattcaagtcaaagaggtcacgcagaatgacggtacgacgacgattgccaataaccttaccagcacggttcaggtgtttactgactcggagtaccagctcccgtacgtcctcggctcggcgcatcaaggatgcctcccgccgttcccagcagacgtcttcatggtgccacagtatggatacctcaccctgaacaacgggagtcaggcagtaggacgctcttcattttactgcctggagtactttccttctcagatgctgcgtaccggaaacaactttaccttcagctacacttttgaggacgttcctttccacagcagctacgctcacagccagagtctggaccgtctcatgaatcccctcatcgaccagtacctgtattacttgagcagaacaaacactccaagtggaaccaccacgcagtcaaggcttcagttttctcaggccggagcgagtgacattcgggaccagtctaggaactggcttcctggaccctgttaccgccagcagcgagtatcaaagacatctgcggataacaacaacagtgaatactcgtggactggagctaccaagtaccacctcaatggcagagactctctggtgaatccgggcccggccatggcaagccacaaggacgatgaagaaaagttttttcctcagagcggggttctcatctttgggaagcaaggctcagagaaaacaaatgtggacattgaaaaggtcatgattacagacgaagaggaaatcaggacaaccaatcccgtggctacggagcagtatggttctgtatctaccaacctccagagaggcaacagacaagcagctaccgcagatgtcaacacacaaggcgttcttccaggcatggtctggcaggacagagatgtgtaccttcaggggcccatctgggcaaagattccacacacggacggacattttcacccctctcccctcatgggtggattcggacttaaacaccctcctccacagattctcatcaagaacaccccggtacctgcgaatccttcgaccaccttcagtgcggcaaagtttgcttccttcatcacacagtactccacgggacaggtcagcgtggagatcgagtgggagctgcagaaggaaaacagcaaacgctggaatcccgaaattcagtacacttccaactacaacaagtctgttaatgtggactttactgtggacactaatggcgtgtattcagagcctcgccccattggcaccagatacctgactcgtaatctgtaa

SEQ ID NO: 2015 - DNA, 2208 bp, Artificial Sequence
  Synthetic Polynucleotide
atggctgccgatggttatcttccagattggctcgaggacactctctctgaaggaataagacagtggtggaagctcaaacctggcccaccaccaccaaagcccgcagagcggcataaggacgacagcaggggtcttgtgcttcctgggtacaagtacctcggacccttcaacggactcgacaagggagagccggtcaacgaggcagacgccgcggccctcgagcacgacaaagcctacgaccggcagctcgacagcggagacaacccgtacctcaagtacaaccacgccgacgcggagtttcaggagcgccttaaagaagatacgtcttttgggggcaacctcggacgagcagtcttccaggcgaaaaagagggttcttgaacctctgggcctggttgaggaacctgttaagacggctccgggaaaaaagaggccggtagagcactctcctgtggagccagactcctcctcgggaaccggaaaggcgggccagcagcctgcaagaaaaagattgaattttggtcagactggagacgcagactcagtacctgacccccagcctctcggacagccaccagcagccccctctggtctgggaactaatacgatggctacaggcagtggcgcaccaatggcagacaataacgagggcgccgacggagtgggtaattcctcgggaaattggcattgcgattccacatggatgggcgacagagtcatcaccaccagcacccgaacctgggccctgcccacctacaacaaccacctctacaaacaaatttccagccaatcaggagcctcgaacgacaatcactactttggctacagcaccccttgggggtattttgacttcaacagattccactgccacttttcaccacgtgactggcaaagactcatcaacaacaactggggattccgacccaagagactcaacttcaagctctttaacattcaagtcaaagaggtcacgcagaatgacggtacgacgacgattgccaataaccttaccagcacggttcaggtgtttactgactcggagtaccagctcccgtacgtcctcggctcggcgcatcaaggatgcctcccgccgttcccagcagacgtcttcatggtgccacagtatggatacctcaccctgaacaacgggagtcaggcagtaggacgctcttcattttactgcctggagtactttccttctcagatgctgcgtaccggaaacaactttaccttcagctacacttttgaggacgttcctttccacagcagctacgctcacagccagagtctggaccgtctcatgaatcctctcatcgaccagtacctgtattacttgagcagaacaaacactccaagtggaaccaccacgcagtcaaggcttcagttttctcaggccggagcgagtgacattcgggaccagtctaggaactggcttcctggaccctgttaccgccagcagcgagtatcaaagacatctgcggataacaacaacagtgaatactcgtggactggagctaccaagtaccacctcaatggcagagactctctggtgaatccgggcccggccatggcaagccacaaggacgatgaagaaaagttttttcctcagagcggggttctcatctttgggaagcaaggctcagagaaaacaaatgtggacattgaaaaggtcatgattacagacgaagaggaaatcaggacaaccaatcccgtggctacggagcagtatggttctgtatctaccaacctccagagaggcaacagacaagcagctaccgcagatgtcaacacacaaggcgttcttccaggcatggtctggcaggacagagatgtgtaccttcaggggcccatctgggcaaagattccacacacggacggacattttcacccctctcccctcatgggtggattcggacttaaacaccctcctccacagattctcatcaagaacaccccggtacctgcgaatccttcgaccaccttcagtgcggcaaagtttgcttccttcatcacacagtactccacgggacaggtcagcgtggagatcgagtgggagctgcagaaggaaaacagcaaacgctggaatcccgaaattcagtacacttccaactacaacaagtctgttaatgtggactttactgtggacactaatggcgtgtattcagagtctcgccccattggcaccagatacctgactcgtaatctgtaa

SEQ ID NO: 2016 - DNA, 2208 bp, Artificial Sequence
  Synthetic Polynucleotide
atggctgccgatggttatcttccagattggctcgaggacactctctctgaaggaataagacagtggtggaagctcaaacctggcccaccaccaccaaagcccgcagagcggcataaggacgacagcaggggtcttgtgcttcctgggtacaagtacctcggacccttcaacggactcgacaagggagagccggtcaacgaggcagacgccgcggccctcgagcacgacaaagcctacgaccggcagctcgacagcggagacaacccgtacctcaagtacaaccacgccgacgcggagtttcaggagcgccttaaagaagatacgtcttttgggggcaacctcggacgagcagtcttccaggcgaaaaagagggttcttgaacctctgggcctggttgaggaacctgttaagacggctccgggaaaaaagaggccggtagagcactctcctgtggagccagactcctcctcgggaaccggaaaggcgggccagcagcctgcaagaaaaagattgaattttggtcagactggagacgcagactcagtacctgacccccagcctctcggacagccaccagcagccccctctggtctgggaactaatacgatggctacaggcagtggcgcaccaatggcagacaataacgagggcgccgacggagtgggtaattcctcgggaaattggcattgcgattccacatggatgggcgacagagtcatcaccaccagcacccgaacctgggccctgcccacctacaacaaccacctctacaaacaaatttccagccaatcaggagcctcgaacgacaatcactactttggctacagcaccccttgggggtattttgacttcaacagattccactgccacttttcaccacgtgactggcaaagactcatcaacaacaactggggattccgacccaagagactcaacttcaagctctttaacattcaagtcaaagaggtcacgcagaatgacggtacgacgacgattgccaataaccttaccagcacggttcaggtgtttactgactcggagtaccagctcccgtacgtcctcggctcggcgcatcaaggatgcctcccgccgttcccagcagacgtcttcatggtgccacagtatggatacctcaccccgaacaacgggagtcaggcagtaggacgctcttcattttactgcctggagtactttccttctcagatgctgcgtaccggaaacaactttaccttcagctacacttttgaggacgttcctttccacagcagctacgctcacagccagagtctggaccgtctcatgaatcctctcatcgaccagtacctgtattacttgagcagaacaaacactccaagtggaaccaccacgcagtcaaggcttcagttttctcaggccggagcgagtgacattcgggaccagtctaggaactggcttcctggaccctgttaccgccagcagcgagtatcaaagacatctgcggataacaacaacagtgaatactcgtggactggagctaccaagtaccacctcaatggcagagactctctggtgaatccgggcccggccatggcaagccacaaggacgatgaagaaaagttttttcctcagagcggggttctcatctttgggaagcaaggctcagagaaaacaaatgtggacattgaaaaggtcatgattacagacgaagaggaaatcaggacaaccaatcccgtggctacggagcagtatggttctgtatctaccaacctccagagaggcaacagacaagcagctaccgcagatgtcaacacacaaggcgttcttccaggcatggtctggcaggacagagatgtgtaccttcaggggcccatctgggcaaagattccacacacggacggacattttcacccctctcccctcatgggtggattcggacttaaacaccctcctccacagattctcatcaagaacaccccggtacctgcgaatccttcgaccaccttcagtgcggcaaagtttgcttccttcatcacacagtactccacgggacaggtcagcgtggagatcgagtgggagctgcagaaggaaaacagcaaacgctggaatcccgaaattcagtacacttccaactacaacaagtctgttaatgtggactttactgtggacactaatggcgtgtattcagagcctcgccccattggcaccagatacctgactcgtaatctgtaa

SEQ ID NO: 2017 - DNA, 2208 bp, Artificial Sequence
  Synthetic Polynucleotide
atggctgccgatggttatcttccagattggctcgaggacactctctctgaaggaataagacagtggtggaagctcaaacctggcccaccaccaccaaagcccgcagagcggcataaggacgacagcaggggtcttgtgcttcctgggtacaagtacctcggacccttcaacggactcgacaagggagagccggtcaacgaggcagacgccgcggccctcgagcacgacaaagcctacgaccggcagctcgacagcggagacaacccgtacctcaagtacaaccacgccgacgcggagtttcaggagcgccttaaagaagatacgtcttttgggggcaacctcggacgagcagtcttccaggcgaaaaagagggttcttgaacctctgggcctggttgaggaacctgttaagacggctccgggaaaaaagaggccggtagagcactctcctgtggagccagactcctcctcgggaaccggaaaggcgggccagcagcctgcaagaaaaagattgaattttggtcagactggagacgcagactcagtacctgacccccagcctctcggacagccaccagcagccccctctggtctgggaactaatacgatggctacaggcagtggcgcaccaatggcagacaataacgagggcgccgacggagtgggtaattcctcgggaaattggcattgcgattccacatggatgggcgacagagtcatcaccaccagcacccgaacctgggccctgcccacctacaacaaccacctctacaaacaaatttccagccaatcaggagcctcgaacgacaatcactactttggctacagcaccccttgggggtattttgacttcaacagattccactgccacttttcaccacgtgactggcaaagactcatcaacaacaactggggattccgacccaagagactcaacttcaagctctttaacattcaagtcaaagaggtcacgcagaatgacggtacgacgacgattgccaataaccttaccagcacggttcaggtgtttactgactcggagtaccagctcccgtacgtcctcggctcggcgcatcaaggatgcctcccgccgttcccagcagacgtcttcatggtgccacagtatggatacctcaccctgaacaacgggagtcaggcagtaggacgctcttcattttactgcctggagtactttccttctcagatgctgcgtaccggaaacaactttaccttcagctacacttttgaggacgttcctttccacagcagctacgctcacagccagagtctggaccgtctcatgaatcctctcatcgaccagtacctgtattacttgagcagaacaaacactccaagtggaaccaccacgcagtcaaggcttcagttttctcaggccggagcgagtgacattcgggaccagtctaggaactggcttcctggaccctgttaccgccagcagcgagtatcaaagacatctgcggataacaacaacagtgaatactcgtggactggagctaccaagtaccacctcaatggcagagactctctggtgaatccgggcccggccatggcaagccacaaggacgatgaagaaaagttttttcctcagagcggggttctcatctttgggaagcaaggctcagagaaaacaaatgtggacattgaaaaggtcatgattacagacgaagaggaaatcaggacaaccaatcccgtggctacggagcagtatggttctgtatctaccaacctccagagaggcaacagacaagcagctaccgcagatgtcaacacacaaggcgttcttccaggcatggcctggcaggacagagatgtgtaccttcaggggcccatctgggcaaagattccacacacggacggacattttcacccctctcccctcatgggtggattcggacttaaacaccctcctccacagattctcatcaagaacaccccggtacctgcgaatccttcgaccaccttcagtgcggcaaagtttgcttccttcatcacacagtactccacgggacaggtcagcgtggagatcgagtgggagctgcagaaggaaaacagcaaacgctggaatcccgaaattcagtacacttccaactacaacaagtctgttaatgtggactttactgtggacactaatggcgtgtattcagagcctcgccccattggcaccagatacctgactcgtaatctgtaa

SEQ ID NO: 2018 - DNA, 2208 bp, Artificial Sequence
  Synthetic Polynucleotide
atggctgccgatggttatcttccagattggctcgaggacactctctctgaaggaataagacagtggtggaagctcaaacctggcccaccaccgccaaagcccgcagagcggcacaaggacgacagtaggggtcttgtgcttcctgggtacaagtacctcggacccttcaacggactcgacaaaggagagccggtcaacgaggcagacgccgcggccctcgagcacgacaaggcctacgaccggcagctcgacagcggagacaacccgtacctcaagtacaaccacgccgacgcggagtttcaggagcgtcttaaagaagatacgtcttttgggggcaacctcggacgagcagtattccaggcgaaaaagagggttcttgaacctctgggcctggttgaggagcctgttaagacggctccgggaaaaaagaggccggtagagcactctcctgtggagccagactcctcctcgggaaccggaaaagcgggccagcagcctgcaagaaaaagattgaattttggtcagactggagacgcagactccgtacctgacccccagcctctcggacagccaccagcagcccccacaagtttgggatctactacaatggctacaggcagtggcgcaccaatggcagacaataacgagggtgccgatggagtgggtaattcctcaggaaattggcattgcgattcccaatggctgggcgacagagtcatcaccaccagcacccgaacctgggccctgcccacctacaacaaccacctctacaagcaaatctccagccaatcaggagcatcgaacgacaaccactactttggccacagcaccccttgggggtattttgacttcaacagattccactgtcacttctccccacgtgactggcaaagactcatcaacaacaactggggattccgacccaagagactcaacttcaagctctttaacattcaagtcaaagaggtcacgcagaatgacggtacgacgacgattgccaataaccttaccagcacggttcaggtgtttactgactcggagtaccagctcccgtacgtcctcggctcggcgcatcaaggatgcctcccgccgttcccagcagacgtcttcatggtcccacagtatggatacctcaccctgaacaacgggagtcaggcggtaggacgctcttccttttactgcctggagtactttccttctcagatgctgcgtaccggaaacaactttaccttcagctacacttttgaggacgttcctttccacagcagctacgctcacagccagagtctggaccgtctcatgaatcctctcatcgaccagtacctgtattacttgagcagaacaaacactccaagtggaaccaccacgcagtcaaggcttcagttttctcaggccggagcgagtgacattcgggaccagtctaggaactggcttcctggaccctgttaccgccagcagcgagtatcaaagacatctgcggataacaacaacagtgaatactcgtggactggagctaccaagtaccacctcaatggcagagactctctggtgaatccgggcccggccatggcaagccacaaggacgatgaagaaaagttttttcctcagagcggggttctcatctttgggaagcaaggctcagagaaaacaaatgtggacattgaaaaggtcatgattacagacgaagaggaaatcaggacaaccaatcccgtggctacggagcagtatggttctgtatctaccaacctccagagaggcaacagacaagcagctaccgcagatgtcaacacacaaggcgttcttccaggcatggtctggcaggacagagatgtgtaccttcaggggcccatctgggcaaagattccacacacggacggacattttcacccctctcccctcatgggtggattcggacttaaacaccctcctccacagattctcatcaagaacaccccggtacctgcgaatccttcgaccaccttcagtgcggcaaagtttgcttccttcatcacacagtactccacgggacaggtcagcgtggagatcgagtgggagctgcagaaggaaaacagcaaacgctggaatcccgaaattcagtacacttccaactacaacaagtctgttaatgtggactttactgtggacactaatggcgtgtattcagagcctcgccccattggcaccagatacctgactcgtaatctgtaa

SEQ ID NO: 2019 - DNA, 2208 bp, Artificial Sequence
  Synthetic Polynucleotide
atggctgccgatggttatcttccagattggctcgaggacactctctctgaaggaataagacagtggtggaagctcaaacctggcccaccaccaccaaagcccgcagagcggcataaggacgacagcaggggtcttgtgcttcctgggtacaagtacctcggacccttcaacggactcgacaagggagagccggtcaacgaggcagacgccgcggccctcgagcacgacaaagcctacgaccggcagctcgacagcggagacaacccgtacctcaagtacaaccacgccgacgcggagtttcaggagcgccttaaagaagatacgtcttttgggggcaacctcggacgagcagtcttccaggcgaaaaagagggttcttgaacctctgggcctggttgaggaacctgttaagacggctccgggaaaaaagaggccggtagagcactctcctgtggagccagactcctcctcgggaaccggaaaggcgggccagcagcctgcaagaaaaagattgaattttggtcagactggagacgcagactcagtacctgacccccagcctctcggacagccaccagcagccccctctggtctgggaactaatacgatggctacaggcagtggcgcaccaatggcagacaataacgagggcgccgacggagtgggtaattcctcgggaaattggcattgcgattccacatggatgggcgacagagtcatcaccaccagcacccgaacctgggccctgcccacctacaacaaccacctctacaaacaaatttccagccaatcaggagcctcgaacgacaatcactactttggctacagcaccccttgggggtattttgacttcaacagattccactgccacttttcaccacgtgactggcaaagactcatcaacaacaactggggattccgacccaagagactcaacttcaagctctttaacattcaagtcaaagaggtcacgcagaatgacggtacgacgacgattgccaataaccttaccagcacggttcaggtgtttactgactcggagtaccagctcccgtacgtcctcggctcggcgcatcaaggatgcctcccgccgttcccagcagacgtcttcatggtgccacagtatggatacctcaccctgaacaacgggagtcaggcagtaggacgctcttcattttactgcctggagtactttccttctcagatgctgcgtaccggaaacaactttaccttcagctacacttttgaggacgttcctttccacagcagctacgctcacagccagagtctggaccgtctcatgaatcctctcatcgaccagtacctgtattacttgagcagaacaaacactccaagtggaaccaccacgcagtcaaggcttcagttttctcaggccggagcgagtgacattcgggaccagtctaggaactggcttcctggaccctgttaccgccagcagcgagtatcaaagacatctgcggataacaacaacagtgaatactcgtggactggagctaccaagtaccacctcaatggcagagactctctggtgaatccgggcccggccatggcaagccacaaggacgatgaagaaaagttttttcctcagagcggggttctcatctttgggaagcaaggctcagagaaaacaaatgtggacattgaaaaggtcatgattacagacgaagaggaaatcaggacaaccaatcccgtggctacggagcagtatggttctgtatctaccaacctccagagaggcaacagacaagcagctaccgcagatgtcaacacacaaggcgttcttccaggcatggtctggcaggacagagatgtgtaccttcaggggcccatctgggcaaagattccacacacggacggacattttcacccctctcccctcatgggtggattcggacttaaacaccctcctccacagattctcatcaagaacaccccggtacctgcgaatccttcgaccaccttcagtgcggcaaagtttgcttccttcatcacacagtactccacgggacaggccagcgtggagatcgagtgggagctgcagaaggaaaacagcaaacgctggaatcccgaaattcagtacacttccaactacaacaagtctgttaatgtggactttactgtggacactaatggcgtgtattcagagcctcgccccattggcaccagatacctgactcgtaatctgtaa

SEQ ID NO: 2020 - DNA, 2208 bp, Artificial Sequence
  Synthetic Polynucleotide
atggctgccgatggttatcttccagattggctcgaggacactctctctgaaggaataagacagtggtggaagctcaaacctggcccaccaccaccaaagcccgcagagcggcataaggacgacagcaggggtcttgtgcttcctgggtacaagtacctcggacccttcaacggactcgacaagggagagccggtcaacgaggcagacgccgcggccctcgagcacgacaaagcctacgaccggcagctcgacagcggagacaacccgtacctcaagtacaaccacgccgacgcggagtttcaggagcgccttaaagaagatacgtcttttgggggcaacctcggacgagcagtcttccaggcgaaaaagagggttcttgaacctctgggcctggttgaggaacctgttaagacggctccgggaaaaaagaggccggtagagcactctcctgtggagccagactcctcctcgggaaccggaaaggcgggccagcagcctgcaagaaaaagattgaattttggtcagactggagacgcagactcagtacctgacccccagcctctcggacagccaccagcagccccctctggtctgggaactaatacgatggctacaggcagtggcgcaccaatggcagacaataacgagggcgccgacggagtgggtaattcctcgggaaattggcattgcgattccacatggatgggcgacagagtcatcaccaccagcacccgaacctgggccctgcccacctacaacaaccacctctacaaacaaatttccagccaatcaggagcctcgaacgacaatcactactttggctacagcaccccttgggggtattttgacttcaacagattccactgccacttttcaccacgtgactggcaaagactcatcaacaacaactggggattccgacccaagagactcaacttcaagctctttaacattcaagtcaaagaggtcacgcagaatgacggtacgacgacgattgccaataaccttaccagcacggttcaggtgtttactgactcggagtaccagctcccgtacgtcctcggctcggcgcatcaaggatgcctcccgccgttcccagcagacgtcttcatggtgccacagtatggatacctcaccctgaacaacgggagtcaggcagtaggacgctcttcattttactgcctggagtactttccttctcagatgctgcgtaccggaaacaactttaccttcagctacacttttgaggacgttcctttccacagcagctacgctcacagccagagtctggaccgtctcatgaatcctctcatcgaccagtacctgtattacttgagcagaacaaacactccaagtggaaccaccacgcagtcaaggcttcagttttctcaggccggagcgagtgacattcgggaccagtctaggaactggcttcctggaccctgttaccgccagcagcgagtatcaaagacatctgcggataacaacaacagtgaatactcgtggactggagctaccaagtaccacctcaatggcagagactctctggtgaatccgggcccggccatggcaagccacaaggacgatgaagaaaagttttttcctcagagcggggttctcatctttgggaagcaaggctcagagaaaacaaatgtggacattgaaaaggtcatgattacagacgaagaggaaatcaggacaaccaatcccgtggctacggagcagtatggttctgtatctaccaacctccagagaggcaacagacaagcagctaccgcagatgtcaacacacaaggcgttcttccaggcatggtctggcaggacagagatgtgtaccttcaggggcccatctgggcaaagattccacacacggacggacattttcacccctctcccctcatgggtggattcggacttaaacaccctcctccacagattctcatcaagaacaccccggtacctgcgaatccttcgaccaccttcagtgcggcaaggtttgcttccttcatcacacagtactccacgggacaggtcagcgtggagatcgagtgggagctgcagaaggaaaacagcaaacgctggaatcccgaaattcagtacacttccaactacaacaagtctgttaatgtggactttactgtggacactaatggcgtgtattcagagcctcgccccattggcaccagatacctgactcgtaatctgtaa

SEQ ID NO: 2021 - DNA, 2208 bp, Artificial Sequence
  Synthetic Polynucleotide
atggctgccgatggttatcttccagattggctcgaggacactctctctgaaggaataagacagtggtggaagctcaaacctggcccaccaccaccaaagcccgcagagcggcataaggacgacagcaggggtcttgtgcttcctgggtacaagtacctcggacccttcaacggactcgacaagggagagccggtcaacgaggcagacgccgcggccctcgagcacgacaaagcctacgaccggcagctcgacagcggagacaacccgtacctcaagtacaaccacgccgacgcggagtttcaggagcgccttaaagaagatacgtcttttgggggcaacctcggacgagcagtcttccaggcgaaaaagagggttcttgaacctctgggcctggttgaggaacctgttaagacggctccgggaaaaaagaggccggtagagcactctcctgtggagccagactcctcctcgggaaccggaaaggcgggccagcagcctgcaagaaaaagattgaattttggtcagactggaggcgcagactcagtacctgacccccagcctctcggacagccaccagcagccccctctggtctgggaactaatacgatggctacaggcagtggcgcaccaatggcagacaataacgagggcgccgacggagtgggtaattcctcgggaaattggcattgcgattccacatggatgggcgacagagtcatcaccaccagcacccgaacctgggccctgcccacctacaacaaccacctctacaaacaaatttccagccaatcaggagcctcgaacgacaatcactactttggctacagcaccccttgggggtattttgacttcaacagattccactgccacttttcaccacgtgactggcaaagactcatcaacaacaactggggattccgacccaagagactcaacttcaagctctttaacattcaagtcaaagaggtcacgcagaatgacggtacgacgacgattgccaataaccttaccagcacggttcaggtgtttactgactcggagtaccagctcccgtacgtcctcggctcggcgcatcaaggatgcctcccgccgttcccagcagacgtcttcatggtgccacagtatggatacctcaccctgaacaacgggagtcaggcagtaggacgctcttcattttactgcctggagtactttccttctcagatgctgcgtaccggaaacaactttaccttcagctacacttttgaggacgttcctttccacagcagctacgctcacagccagagtctggaccgtctcatgaatcctctcatcgaccagtacctgtattacttgagcagaacaaacactccaagtggaaccaccacgcagtcaaggcttcagttttctcaggccggagcgagtgacattcgggaccagtctaggaactggcttcctggaccctgttaccgccagcagcgagtatcaaagacatctgcggataacaacaacagtgaatactcgtggactggagctaccaagtaccacctcaatggcagagactctctggtgaatccgggcccggccatggcaagccacaaggacgatgaagaaaagttttttcctcagagcggggttctcatctttgggaagcaaggctcagagaaaacaaatgtggacattgaaaaggtcatgattacagacgaagaggaaatcaggacaaccaatcccgtggctacggagcagtatggttctgtatctaccaacctccagagaggcaacagacaagcagctaccgcagatgtcaacacacaaggcgttcttccaggcatggtctggcaggacagagatgtgtaccttcaggggcccatctgggcaaagattccacacacggacggacattttcacccctctcccctcatgggtggattcggacttaaacaccctcctccacagattctcatcaagaacaccccggtacctgcgaatccttcgaccaccttcagtgcggcaaagtttgcttccttcatcacacagtactccacgggacaggtcagcgtggagatcgagtgggagctgcagaaggaaaacagcaaacgctggaatcccgaaattcagtacacttccaactacaacaagtctgttaatgtggactttactgtggacactaatggcgtgtattcagagcctcgccccattggcaccagatacctgactcgtaatctgtaa

SEQ ID NO: 2022 - DNA, 2208 bp, Artificial Sequence
  Synthetic Polynucleotide
atggctgccgatggttatcttccagattggctcgaggacactctctctgaaggaataagacagtggtggaagctcaaacctggcccaccaccaccaaagcccgcagagcggcataaggacgacagcaggggtcttgtgcttcctgggtacaagtacctcggacccttcaacggactcgacaagggagagccggtcaacgaggcagacgccgcggccctcgagcacgacaaagcctacgaccggcagctcgacagcggagacaacccgtacctcaagtacaaccacgccgacgcggagtttcaggagcgccttaaagaagatacgtcttttgggggcaacctcggacgagcagtcttccaggcgaaaaagagggttcttgaacctctgggcctggttgaggaacctgttaagacggctccgggaaaaaagaggccggtagagcactctcctgtggagccagactcctcctcgggaaccggaaaggcgggccagcagcctgcaagaaaaagattgaattttggtcagactggagacgcagactcagtacctgacccccagcctctcggacagccaccagcagccccctctggtctgggaactaatacgatggctacaggcagtggcgcaccaatggcagacaataacgagggcgccgacggagtgggtaattcctcgggaaattggcattgcgattccacatggatgggcgacagagtcatcaccaccagcacccgaacctgggccctgcccacctacaacaaccacctctacaaacaaatttccagccaatcaggagcctcgaacgacaatcactactttggctacagcaccccttgggggtattttgacttcaacagattccactgccacttttcaccacgtgactggcaaagactcatcaacaacaactggggattccgacccaagagactcaacttcaagctctttaacattcaagtcaaagaggtcacgcagaatgacggtacgacgacgattgccaataaccttaccagcacggttcaggtgtttactgactcggagtaccagctcccgtacgtcctcggctcggcgcatcaaggatgcctcccgccgttcccagcagacgtcttcatggtgccacagtatggatacctcaccctgaacaacgggagtcaggcagtaggacgctcttcattttactgcctggagtactttccttctcagatgctgcgtaccggaaacaactttaccttcagctacacttttgaggacgttcctttccacagcagctacgctcacagccagagtctggaccgtctcatgaatcctctcatcgaccagtacctgtattacttgagcagaacaaacactccaagtggaaccaccacgcagtcaaggcttcagttttctcaggccggagcgagtgacattcgggaccagtctaggaactggcttcctggaccctgttaccgccagcagcgagtatcaaagacatctgcggataacaacaacagtgaatactcgtggactggagctaccaagtaccacctcaatggcagagactctctggtgaatccgggcccggccatggcaagccacaaggacgatgaagaaaagttttttcctcagagcggggttctcatctttgggaagcaaggctcagagaaaacaaatgtggacattgaaaaggtcatgattacagacgaagaggaaatcaggacaaccaatcccgtggctacggagcagtatggttctgtatctaccaacctccagagaggcaacagacaagcagctaccgcagatgtcaacacacaaggcgttcttccaggcatggtctggcaggacagagatgtgtaccttcaggggcccatctgggcaaagattccacacacggacggacattttcacccctctcccctcatgggtggattcggacttaaacaccctcctccacagattctcatcaagaacaccccggtacctgcgaatccttcgaccaccttcagtgcggcaaagtttgcttccttcatcacacagtactccacgggacaggtcagcgtggagatcgagtgggagctgcagaaggaaaacagcaaacgctggaatcccgaaattcagtacacttccaactacaacaagtctgctaatgtggactttactgtggacactaatggcgtgtattcagagcctcgccccattggcaccagatacctgactcgtaatctgtaa

SEQ ID NO: 2023 - DNA, 2208 bp, Artificial Sequence
  Synthetic Polynucleotide
atggctgccgatggttatcttccagattggctcgaggacactctctctgaaggaataagacagtggtggaagctcaaacctggcccaccaccaccaaagcccgcagagcggcataaggacgacagcaggggtcttgtgcttcctgggtacaagtacctcggacccttcaacggactcgacaagggagagccggtcaacgaggcagacgccgcggccctcgagcacgacaaagcctacgaccggcagctcgacagcggagacaacccgtacctcaagtacaaccacgccgacgcggagtttcaggagcgccttaaagaagatacgtcttttgggggcaacctcggacgagcagtcttccaggcgaaaaagagggttcttgaacctctgggcctggttgaggaacctgttaagacggctccgggaaaaaagaggccggtagagcactctcctgtggagccagactcctcctcgggaaccggaaaggcgggccagcagcctgcaagaaaaagattgaattttggtcagactggagacgcagactcagtacctgacccccagcctctcggacagccaccagcagccccctctggtctgggaactaatacgatggctacaggcagtggcgcaccaatggcagacaataacgagggcgccgacggagtgggtaattcctcgggaaattggcattgcgattccacatggatgggcgacagagtcatcaccaccagcacccgaacctgggccctgcccacctacaacaaccacctctacaaacaaatttccagccaatcaggagcctcgaacgacaatcactactttggctacagcaccccttgggggtattttgacttcaacagattccactgccacttttcaccacgtgactggcaaagactcatcaacaacaactggggattccgacccaagagactcaacttcaagctctttaacattcaagtcaaagaggtcacgcagaatgacggtacgacgacgattgccaataaccttaccagcacggttcaggtgtttactgactcggagtaccagctcccgtacgtcctcggctcggcgcatcaaggatgcctcccgccgttcccagcagacgtcttcatggtgccacagtatggatacctcaccctgaacaacgggagtcaggcagtaggacgctcttcattttactgcctggagtactttccttctcagatgctgcgtaccggaaacaactttaccttcagctacacttttgaggacgttcctttccacagcagctacgctcacagccagagtctggaccgtctcatgaatcctctcatcgaccagtacctgtattacttgagcagaacaaacactccaagtggaaccaccacgcagtcaaggcttcagttttctcaggccggagcgagtgacattcgggaccggtctaggaactggcttcctggaccctgttaccgccagcagcgagtatcaaagacatctgcggataacaacaacagtgaatactcgtggactggagctaccaagtaccacctcaatggcagagactctctggtgaatccgggcccggccatggcaagccacaaggacgatgaagaaaagttttttcctcagagcggggttctcatctttgggaagcaaggctcagagaaaacaaatgtggacattgaaaaggtcatgattacagacgaagaggaaatcaggacaaccaatcccgtggctacggagcagtatggttctgtatctaccaacctccagagaggcaacagacaagcagctaccgcagatgtcaacacacaaggcgttcttccaggcatggtctggcaggacagagatgtgtaccttcaggggcccatctgggcaaagattccacacacggacggacattttcacccctctcccctcatgggtggattcggacttaaacaccctcctccacagattctcatcaagaacaccccggtacctgcgaatccttcgaccaccttcagtgcggcaaagtttgcttccttcatcacacagtactccacgggacaggtcagcgtggagatcgagtgggagctgcagaaggaaaacagcaaacgctggaatcccgaaattcagtacacttccaactacaacaagtctgttaatgtggactttactgtggacactaatggcgtgtattcagagcctcgccccattggcaccagatacctgactcgtaatctgtaa

SEQ ID NO: 2024 - DNA, 2208 bp, Artificial Sequence
  Synthetic Polynucleotide
atggctgccgatggttatcttccagattggctcgaggacactctctctgaaggaataagacagtggtggaagctcaaacctggcccaccaccaccaaagcccgcagagcggcataaggacgacagcaggggtcttgtgcttcctgggtacaagtacctcggacccttcaacggactcgacaagggagagccggtcaacgaggcagacgccgcggccctcgagcacgacaaagcctacgaccggcagctcgacagcggagacaacccgtacctcaagtacaaccacgccgacgcggagtttcaggagcgccttaaagaagatacgtcttttgggggcaacctcggacgagcagtcttccaggcgaaaaagagggttcttgaacctctgggcctggttgaggaacctgttaagacggctccgggaaaaaagaggccggtagagcactctcctgtggagccagactcctcctcgggaaccggaaaggcgggccagcagcctgcaagaaaaagattgaattttggtcagactggagacgcagactcagtacctgacccccagcctctcggacagccaccagcagccccctctggtctgggaactaatacgatggctacaggcagtggcgcaccaatggcagacaataacgagggcgccgacggagtgggtaattcctcgggaaattggcattgcgattccacatggatgggcgacagagtcatcaccaccagcacccgaacctgggccctgcccacctacaacaaccacctctacaaacaaatttccagccaatcaggagcctcgaacgacaatcactactttggctacagcaccccttgggggtattttgacttcaacagattccactgccacttttcaccacgtgactggcaaagactcatcaacaacaactggggattccgacccaagagactcaacttcaagctctttaacattcaagtcaaagaggtcacgcagaatgacggtacgacgacgattgccaataaccttaccagcacggttcaggtgtttactgactcggagtaccagctcccgtacgtcctcggctcggcgcatcaaggatgcctcccgccgttcccagcagacgtcttcatggtgccacagtatggatacctcaccctgaacaacgggagtcaggcagtaggacgctcttcattttactgcctggagtactttccttctcagatgctgcgtaccggaaacaactttaccttcagctacacttttgaggacgttcctttccacagcagctacgctcacagccagagtctggaccgtctcatgaatcctctcatcgaccagtacctgtattacttgagcagaacaaacactccaagtggaaccaccacgcagtcaaggcttcagttttctcaggccggagcgagtgacattcgggaccagtctaggaactggcttcctggaccctgttaccgccagcagcgagtatcaaaggcatctgcggataacaacaacagtgaatactcgtggactggagctaccaagtaccacctcaatggcagagactctctggtgaatccgggcccggccatggcaagccacaaggacgatgaagaaaagttttttcctcagagcggggttctcatctttgggaagcaaggctcagagaaaacaaatgtggacattgaaaaggtcatgattacagacgaagaggaaatcaggacaaccaatcccgtggctacggagcagtatggttctgtatctaccaacctccagagaggcaacagacaagcagctaccgcagatgtcaacacacaaggcgttcttccaggcatggtctggcaggacagagatgtgtaccttcaggggcccatctgggcaaagattccacacacggacggacattttcacccctctcccctcatgggtggattcggacttaaacaccctcctccacagattctcatcaagaacaccccggtacctgcgaatccttcgaccaccttcagtgcggcaaagtttgcttccttcatcacacagtactccacgggacaggtcagcgtggagatcgagtgggagctgcagaaggaaaacagcaaacgctggaatcccgaaattcagtacacttccaactacaacaagtctgttaatgtggactttactgtggacactaatggcgtgtattcagagcctcgccccattggcaccagatacctgactcgtaatctgtaa

SEQ ID NO: 2025 - DNA, 2208 bp, Artificial Sequence
  Synthetic Polynucleotide
atggctgccgatggttatcttccagattggctcgaggacactctctctgaaggaataagacagtggtggaagctcaaacctggcccaccaccaccaaagcccgcagagcggcataaggacgacagcaggggtcttgtgcttcctgggtacaagtacctcggacccttcaacggactcgacaagggagagccggtcaacgaggcagacgccgcggccctcgagcacgacaaagcctacgaccggcagctcgacagcggagacaacccgtacctcaagtacaaccacgccgacgcggagtttcaggagcgccttaaagaagatacgtcttttgggggcaacctcggacgagcagtcttccaggcgaaaaagagggttcttgaacctctgggcctggttgaggaacctgttaagacggctccgggaaaaaagaggccggtagagcactctcctgtggagccagactcctcctcgggaaccggaaaggcgggccagcagcctgcaagaaaaagattgaattttggtcagactggagacgcagactcagtacctgacccccagcctctcggacagccaccagcagccccctctggtctgggaactaatacgatggctacaggcagtggcgcaccaatggcagacaataacgagggcgccgacggagtgggtaattcctcgggaaattggcattgcgattccacatggatgggcgacagagtcatcaccaccagcacccgaacctgggccctgcccacctacaacaaccacctctacaaacaaatttccagccaatcaggagcctcgaacgacaatcactactttggctacagcaccccttgggggtattttgacttcaacagattccactgccacttttcaccacgtgactggcaaagactcatcaacaacaactggggattccgacccaagagactcaacttcaagctctttaacattcaagtcaaagaggtcacgcagaatgacggtacgacgacgattgccaataaccttaccagcacggttcaggtgtttactgactcggagtaccagctcccgtacgtcctcggctcggcgcatcaaggatgcctcccgccgttcccagcagacgtcttcatggtgccacagtatggatacctcaccctgaacaacgggagtcaggcagtaggacgctcttcattttactgcctggagtactttccttctcagatgctgcgtaccggaaacaactttaccttcagctacacttttgaggacgttcctttccacagcagctacgctcacagccagagtctggaccgtctcatgaatcctctcatcgaccagtacctgtattacttgagcagaacaaacactccaagtggaaccaccacgcagtcaaggcttcagttttctcaggccggagcgagtgacattcgggaccagtctaggaactggcttcctggaccctgttaccgccagcagcgagtatcaaagacatctgcggataacaacaacagtgaatactcgtggactggagctaccaagcaccacctcaatggcagagactctctggtgaatccgggcccggccatggcaagccacaaggacgatgaagaaaagttttttcctcagagcggggttctcatctttgggaagcaaggctcagagaaaacaaatgtggacattgaaaaggtcatgattacagacgaagaggaaatcaggacaaccaatcccgtggctacggagcagtatggttctgtatctaccaacctccagagaggcaacagacaagcagctaccgcagatgtcaacacacaaggcgttcttccaggcatggtctggcaggacagagatgtgtaccttcaggggcccatctgggcaaagattccacacacggacggacattttcacccctctcccctcatgggtggattcggacttaaacaccctcctccacagattctcatcaagaacaccccggtacctgcgaatccttcgaccaccttcagtgcggcaaagtttgcttccttcatcacacagtactccacgggacaggtcagcgtggagatcgagtgggagctgcagaaggaaaacagcaaacgctggaatcccgaaattcagtacacttccaactacaacaagtctgttaatgtggactttactgtggacactaatggcgtgtattcagagcctcgccccattggcaccagatacctgactcgtaatctgtaa

SEQ ID NO: 2026 - DNA, 2208 bp, Artificial Sequence
  Synthetic Polynucleotide
atggctgccgatggttatcttccagattggctcgaggacactctctctgaaggaataagacagtggtggaagctcaaacctggcccaccaccaccaaagcccgcagagcggcataaggacgacagcaggggtcttgtgcttcctgggtacaagtacctcggacccttcaacggactcgacaagggagagccggtcaacgaggcagacgccgcggccctcgagcacgacaaagcctacgaccggcagctcgacagcggagacaacccgtacctcaagtacaaccacgccgacgcggagtttcaggagcgccttaaagaagatacgtcttttgggggcaacctcggacgagcagtcttccaggcgaaaaagagggttcttgaacctctgggcctggttgaggaacctgttaagacggctccgggaaaaaagaggccggtagagcactctcctgtggagccagactcctcctcgggaaccggaaaggcgggccagcagcctgcaagaaaaagattgaattttggtcagactggagacgcagactcagtacctgacccccagcctctcggacagccaccagcagccccctctggtctgggaactaatacgatggctacaggcagtggcgcaccaatggcagacaataacgagggcgccgacggagtgggtaattcctcgggaaattggcattgcgattccacatggatgggcgacagagtcatcaccaccagcacccgaacctgggccctgcccacctacaacaaccacctctacaaacaaatttccagccaatcaggagcctcgaacgacaatcactactttggctacagcaccccttgggggtattttgacttcaacagattccactgccacttttcaccacgtgactggcaaagactcatcaacaacaactggggattccgacccaagagactcaacttcaagctctttaacattcaagtcaaagaggtcacgcagaatgacggtacgacgacgattgccaataaccttaccggcacggttcaggtgtttactgactcggagtaccagctcccgtacgtcctcggctcggcgcatcaaggatgcctcccgccgttcccagcagacgtcttcatggtgccacagtatggatacctcaccctgaacaacgggagtcaggcagtaggacgctcttcattttactgcctggagtactttccttctcagatgctgcgtaccggaaacaactttaccttcagctacacttttgaggacgttcctttccacagcagctacgctcacagccagagtctggaccgtctcatgaatcctctcatcgaccagtacctgtattacttgagcagaacaaacactccaagtggaaccaccacgcagtcaaggcttcagttttctcaggccggagcgagtgacattcgggaccagtctaggaactggcttcctggaccctgttaccgccagcagcgagtatcaaagacatctgcggataacaacaacagtgaatactcgtggactggagctaccaagtaccacctcaatggcagagactctctggtgaatccgggcccggccatggcaagccacaaggacgatgaagaaaagttttttcctcagagcggggttctcatctttgggaagcaaggctcagagaaaacaaatgtggacattgaaaaggtcatgattacagacgaagaggaaatcaggacaaccaatcccgtggctacggagcagtatggttctgtatctaccaacctccagagaggcaacagacaagcagctaccgcagatgtcaacacacaaggcgttcttccaggcatggtctggcaggacagagatgtgtaccttcaggggcccatctgggcaaagattccacacacggacggacattttcacccctctcccctcatgggtggattcggacttaaacaccctcctccacagattctcatcaagaacaccccggtacctgcgaatccttcgaccaccttcagtgcggcaaagtttgcttccttcatcacacagtactccacgggacaggtcagcgtggagatcgagtgggagctgcagaaggaaaacagcaaacgctggaatcccgaaattcagtacacttccaactacaacaagtctgttaatgtggactttactgtggacactaatggcgtgtattcagagcctcgccccattggcaccagatacctgactcgtaatctgtaa

SEQ ID NO: 2027 - DNA, 2208 bp, Artificial Sequence
  Synthetic Polynucleotide
atggctgccgatggttatcttccagattggctcgaggacactctctctgaaggaataagacagtggtggaagctcaaacctggcccaccaccaccaaagcccgcagagcggcataaggacgacagcaggggtcttgtgcttcctgggtacaagtacctcggacccttcaacggactcgacaagggagagccggtcaacgaggcagacgccgcggccctcgagcacgacaaagcctacgaccggcagctcgacagcggagacaacccgtacctcaagtacaaccacgccgacgcggagtttcaggagcgccttaaagaagatacgtcttttgggggcaacctcggacgagcagtcttccgggcgaaaaagagggttcttgaacctctgggcctggttgaggaacctgttaagacggctccgggaaaaaagaggccggtagagcactctcctgtggagccagactcctcctcgggaaccggaaaggcgggccagcagcctgcaagaaaaagattgaattttggtcagactggagacgcagactcagtacctgacccccagcctctcggacagccaccagcagccccctctggtctgggaactaatacgatggctacaggcagtggcgcaccaatggcagacaataacgagggcgccgacggagtgggtaattcctcgggaaattggcattgcgattccacatggatgggcgacagagtcatcaccaccagcacccgaacctgggccctgcccacctacaacaaccacctctacaaacaaatttccagccaatcaggagcctcgaacgacaatcactactttggctacagcaccccttgggggtattttgacttcaacagattccactgccacttttcaccacgtgactggcaaagactcatcaacaacaactggggattccgacccaagagactcaacttcaagctctttaacattcaagtcaaagaggtcacgcagaatgacggtacgacgacgattgccaataaccttaccagcacggttcaggtgtttactgactcggagtaccagctcccgtacgtcctcggctcggcgcatcaaggatgcctcccgccgttcccagcagacgtcttcatggtgccacagtatggatacctcaccctgaacaacgggagtcaggcagtaggacgctcttcattttactgcctggagtactttccttctcagatgctgcgtaccggaaacaactttaccttcagctacacttttgaggacgttcctttccacagcagctacgctcacagccagagtctggaccgtctcatgaatcctctcatcgaccagtacctgtattacttgagcagaacaaacactccaagtggaaccaccacgcagtcaaggcttcagttttctcaggccggagcgagtgacattcgggaccagtctaggaactggcttcctggaccctgttaccgccagcagcgagtatcaaagacatctgcggataacaacaacagtgaatactcgtggactggagctaccaagtaccacctcaatggcagagactctctggtgaatccgggcccggccatggcaagccacaaggacgatgaagaaaagttttttcctcagagcggggttctcatctttgggaagcaaggctcagagaaaacaaatgtggacattgaaaaggtcatgattacagacgaagaggaaatcaggacaaccaatcccgtggctacggagcagtatggttctgtatctaccaacctccagagaggcaacagacaagcagctaccgcagatgtcaacacacaaggcgttcttccaggcatggtctggcaggacagagatgtgtaccttcaggggcccatctgggcaaagattccacacacggacggacattttcacccctctcccctcatgggtggattcggacttaaacaccctcctccacagattctcatcaagaacaccccggtacctgcgaatccttcgaccaccttcagtgcggcaaagtttgcttccttcatcacacagtactccacgggacaggtcagcgtggagatcgagtgggagctgcagaaggaaaacagcaaacgctggaatcccgaaattcagtacacttccaactacaacaagtctgttaatgtggactttactgtggacactaatggcgtgtattcagagcctcgccccattggcaccagatacctgactcgtaatctgtaa

SEQ ID NO: 2028 - DNA, 2208 bp, Artificial Sequence
  Synthetic Polynucleotide
atggctgccgatggttatcttccagattggctcgaggacactctctctgaaggaataagacagtggtggaagctcaaacctggcccaccaccaccaaagcccgcagagcggcataaggacgacagcaggggtcttgtgcttcctgggtacaagtacctcggacccttcaacggactcgacaagggagagccggtcaacgaggcagacgccgcggccctcgagcacgacaaagcctacgaccggcagctcgacagcggagacaacccgtacctcaagtacaaccacgccgacgcggagtttcaggagcgccttaaagaagatacgtcttttgggggcaacctcggacgagcagtcttccaggcgaaaaagagggttcttgaacctctgggcctggttgaggaacctgttaagacggctccgggaaaaaagaggccggtagagcactctcctgtggagccagactcctcctcgggaaccggaaaggcgggccagcagcctgcaagaaaaagattgaattttggtcagactggagacgcagactcagtacctgacccccagcctctcggacagccaccagcagccccctctggtctgggaactaatacgatggctacaggcagtggcgcaccaatggcagacaataacgagggcgccgacggagtgggtaattcctcgggaaattggcattgcgattccacatggatgggcgacagagtcatcaccaccagcacccgaacctgggccctgcccacctacaacaaccacctctacaaacaaatttccagccaatcaggagcctcgaacgacaatcactactttggctacagcaccccttgggggtattttgacttcaacagattccactgccacttttcaccacgtgactggcaaagactcatcaacaacaactggggattccgacccaagagactcaacttcaagctctttaacattcaagtcaaagaggtcacgcagaatgacggtacgacgacgattgccaataaccttaccagcacggttcaggtgtttactgactcggagtaccagctcccgtacgtcctcggctcggcgcatcaaggatgcctcccgccgttcccagcagacgtcttcatggtgccacagtatggatacctcaccctgaacaacgggagtcaggcagtaggacgctcttcattttactgcctggagtactttccttctcagatgctgcgtaccggaaacaactttaccttcagctacacttttgaggacgttcctttccacagcagctacgctcacagccagagtctggaccgtctcatgaatcctctcatcgaccagtacctgtattacttgagcagaacaaacactccaagtggaaccaccacgcagtcaaggcttcagttttctcaggccggagcgagtgacattcgggaccagtctaggaactggcttcctggaccctgttaccgccagcagcgagtatcaaagacatctgcggataacaacaacagtgaatactcgtggactggagctaccaagtaccacctcaatggcagagactctctggtgaatccgggcccggccatggcaagccacaaggacgatgaagaaaagttttttcctcagagcggggttctcatctttgggaagcaaggctcagagaaaacaaatgtggacattgaaaaggtcatgattacagacgaagaggaaatcaggacaaccaatcccgtggctacggagcagtatggttctgtatctaccaacctccagagaggcaacagacaagcagctaccgcagatgtcaacacacaaggcgttcttccaggcacggtctggcaggacagagatgtgtaccttcaggggcccatctgggcaaagattccacacacggacggacattttcacccctctcccctcatgggtggattcggacttaaacaccctcctccacagattctcatcaagaacaccccggtacctgcgaatccttcgaccaccttcagtgcggcaaagtttgcttccttcatcacacagtactccacgggacaggccagcgtggagatcgagtgggagctgcagaaggaaaacagcaaacgctggaatcccgaaattcagtacacttccaactacaacaagtctgttaatgtggactttactgtggacactaatggcgtgtattcagagcctcgccccattggcaccagatacctgactcgtaatctgtaa

SEQ ID NO: 2029 - DNA, 2208 bp, Artificial Sequence
  Synthetic Polynucleotide
atggctgccgatggttatcttccagattggctcgaggacactctctctgaaggaataagacagtggtggaagctcaaacctggcccaccaccgccaaagcccgcagagcggcacaaggacgccagtaggggtcttgtgcttcctgggtacaagtacctcggacccttcaacggactcgacaaaggagagccggtcaacgaggcagacgccgcggccctcgagcacgacaaggcctacgaccggcagctcgacagcggagacaacccgtacctcaagtacaaccacgccgacgcggagtttcaggagcgtcttaaagaagatacgtcttttgggggcaacctcggacgagcagtattccaggcgaaaaagagggttcttgaacctctgggcctggttgaggagcctgttaagacggctccgggaaaaaagaggccggtagagcactctcctgtggagccagactcctcctcgggaaccggaaaagcgggccagcagcctgcaagaaaaagattgaattttggtcagactggagacgcagactccgtacctgacccccagcctctcggacagccaccagcagcccccacaagtttgggatctactacaatggctacaggcagtggcgcaccaatggcagacaataacgagggtgccgatggagtgggtaattcctcaggaaattggcattgcgattcccaatggctgggcgacagagtcatcaccaccagcacccgaacctgggccctgcccacctacaacaaccacctctacaagcaaatctccagccaatcaggagcatcgaacgacaaccactactttggctacagcaccccttgggggtattttgacttcaacagattccactgtcacttctccccacgtgactggcaaagactcatcaacaacaactggggattccgacccaagagactcaacttcaagctctttaacattcaagtcaaagaggtcacgcagaatgacggtacgacgacgattgccaataaccttaccagcacggttcaggtgtttactgactcggagtaccagctcccgtacgtcctcggctcggcgcatcaaggatgcctcccgccgttcccagcagacgtcttcatggtcccacagtatggatacctcaccctgaacaacgggagtcaggcggtaggacgctcttccttttactgcctggagtactttccttctcagatgctgcgtaccggaaacaactttaccttcagctacacttttgaggacgttcctttccacagcagctacgctcacagccagagtctggaccgtctcatgaatcctctcatcgaccagtacctgtattacttgagcagaacaaacactccaagtggaaccaccacgcagtcaaggcttcagttttctcaggccggagcgagtgacattcgggaccagtctaggaactggcttcctggaccctgttaccgccagcagcgagtatcaaagacatctgcggataacaacaacagtgaatactcgtggactggagctaccaagtaccacctcaatggcagagactctctggtgaatccgggcccggccatggcaagccacaaggacgatgaagaaaagttttttcctcagagcggggttctcatctttgggaagcaaggctcagagaaaacaaatgtggacattgaaaaggtcatgattacagacgaagaggaaatcaggacaaccaatcccgtggctacggagcagtatggttctgtatctaccaacctccagagaggcaacagacaagcagctaccgcagatgtcaacacacaaggcgttcttccaggcatggtctggcaggacagagatgtgtaccttcaggggcccatctgggcaaagattccacacacggacggacattttcacccctctcccctcatgggtggattcggacttaaacaccctcctccacagattctcatcaagaacaccccggtacctgcgaatccttcgaccaccttcagtgcggcaaagtttgcttccttcatcacacagtactccacgggacaggtcagcgtggagatcgagtgggagctgcagaaggaaaacagcaaacgctggaatcccgaaattcagtacacttccaactacaacaagtctgttaatgtggactttactgtggacactaatggcgtgtattcagagcctcgccccattggcaccagatacctgactcgtaatctgtaa

SEQ ID NO: 2030 - DNA, 2208 bp, Artificial Sequence
  Synthetic Polynucleotide
atggctgccgatggttatcttccagattggctcgaggacactctctctgaaggaataagacagtggtggaagctcaaacctggcccaccaccaccaaagcccgcagagcggcataaggacgacagcaggggtcttgtgcttcctgggtacaagtacctcggacccttcaacggactcgacaagggagagccggtcaacgaggcagacgccgcggccctcgagcacgacaaagcctacgaccggcagctcgacagcggagacaacccgtacctcaagtacaaccacgccgacgcggagtttcaggagcgccttaaagaagatacgtcttttgggggcaacctcggacgagcagtcttccaggcgaaaaagagggttcttgaacctctgggcctggttgaggaacctgttaagacggctccgggaaaaaagaggccggtagagcactctcctgtggagccagactcctcctcgggaaccggaaaggcgggccagcagcctgcaagaaaaagattgaattttggtcagactggagacgcagactcagtacctgacccccagcctctcggacagccaccagcagccccctctggtctgggaactaatacgatggctacaggcagtggcgcaccaatggcagacaataacgagggcgccgacggagtgggtaattcctcgggaaattggcattgcgattccacatggatgggcgacagagtcatcaccaccagcacccgaacctgggccctgcccacctacaacaaccacctctacaaacaaatttccagccaatcaggagccccgaacgacaatcactactttggctacagcaccccttgggggtattttgacttcaacagattccactgccacttttcaccacgtgactggcaaagactcatcaacaacaactggggattccgacccaagagactcaacttcaagctctttaacattcaagtcaaagaggtcacgcagaatgacggtacgacgacgattgccaataaccttaccagcacggttcaggtgtttactgactcggagtaccagctcccgtacgtcctcggctcggcgcatcaaggatgcctcccgccgttcccagcagacgtcttcatggtgccacagtatggatacctcaccctgaacaacgggagtcaggcagtaggacgctcttcattttactgcctggagtactttccttctcagatgctgcgtaccggaaacaactttaccttcagctacacttttgaggacgttcctttccacagcagctacgctcacagccagagtctggaccgtctcatgaatcctctcatcgaccagtacctgtattacttgagcagaacaaacactccaagtggaaccaccacgcagtcaaggcttcagttttctcaggccggagcgagtgacattcgggaccagtctaggaactggcttcctggaccctgttaccgccagcagcgagtatcaaagacatctgcggataacaacaacagtgaatactcgtggactggagctaccaagtaccacctcaatggcagagactctctggtgaatccgggcccggccatggcaagccacaaggacgatgaagaaaagttttttcctcagagcggggttctcatctttgggaagcaaggctcagagaaaacaaatgtggacattgaaaaggtcatgattacagacgaagaggaaatcaggacaaccaatcccgtggctacggagcagtatggttctgtatctaccaacctccagagaggcaacagacaagcagctaccgcagatgtcaacacacaaggcgttcttccaggcatggtctggcaggacagagatgtgtaccttcaggggcccatctgggcaaagattccacacacggacggacattttcacccctctcccctcatgggtggattcggacttaaacaccctcctccacagattctcatcaagaacaccccggtacctgcgaatccttcgaccaccttcagtgcggcaaagtttgcttccttcatcacacagtactccacgggacaggccagcgtggagatcgagtgggagctgcagaaggaaaacagcaaacgctggaatcccgaaattcagtacacttccaactacaacaagtctgttaatgtggactttactgtggacactaatggcgtgtattcagagcctcgccccattggcaccagatacctgactcgtaatctgtaa

SEQ ID NO: 2031 - DNA, 2208 bp, Artificial Sequence
  Synthetic Polynucleotide
atggctgccgatggttatcttccagattggctcgaggacactctctctgaaggaataagacagtggtggaagctcaaacctggcccaccaccaccaaagcccgcagagcggcataaggacgacagcaggggtcttgtgcttcctgggtacaagtacctcggacccttcaacggactcgacaaaggagagccggtcaacgaggcagacgccgcggccctcgagcacgacaaggcctacgaccggcagctcgacagcggagacaacccgtacctcaagtacaaccacgccgacgcggagtttcaggagcgtcttaaagaagatacgtcttttgggggcaacctcggacgagcagtattccaggcgaaaaagagggttcttgaacctctgggcctggttgaggagcctgttaagacggctccgggaaaaaagaggccggtagagcactctcctgtggagccagactcctcctcgggaaccggaaaagcgggccagcagcctgcaagaaaaagattgaattttggtcagactggagacgcagactccgtacctgacccccagcctctcggacagccaccagcagcccccacaagtttgggatctactacaatggctacaggcagtggcgcaccaatggcagacaataacgagggtgccgatggagtgggtaattcctcaggaaattggcattgcgattcccaatggctgggcgacagagtcatcaccaccagcacccgaacctgggccctgcccacctacaacaaccacctctacaaacaaatttccagccaatcaggagcctcgaacgacaatcactactttggctacagcaccccttgggggtattttgacttcaacagattccactgccacttttcaccacgtgactggcaaagactcatcaacaacaactggggattccgacccaagagactcaacttcaagctctttaacattcaagtcaaagaggtcacgcagaatgacggtacgacgacgattgccaataaccttaccagcacggttcaggtgtttactgactcggagtaccagctcccgtacgtcctcggctcggcgcatcaaggatgcctcccgccgttcccagcagacgtcttcatggtgccacagtatggatacctcaccctgaacaacgggagtcaggcagtaggacgctcttcattttactgcctggagtactttccttctcagatgctgcgtaccggaaacaactttaccttcagctacacttttgaggacgttcctttccacagcagctacgctcacagccagagtctggaccgtctcatgaatcctctcatcgaccagtacctgtattacttgagcagaacaaacactccaagtggaaccaccacgcagtcaaggcttcagttttctcaggccggagcgagtgacattcgggaccagtctaggaactggcttcctggaccctgttaccgccagcagcgagtatcaaagacatctgcggataacaacaacagtgaatactcgtggactggagctaccaagtaccacctcaatggcagagactctctggtgaatccgggcccggccatggcaagccacaaggacgatgaagaaaagttttttcctcagagcggggttctcatctttgggaagcaaggctcagagaaaacaaatgtggacattgaaaaggtcatgattacagacgaagaggaaatcaggacaaccaatcccgtggctacggagcagtatggttctgtatctaccaacctccagagaggcaacagacaagcagctaccgcagatgtcaacacacaaggcgttcttccaggcatggtctggcaggacagagatgtgtaccttcaggggcccatctgggcaaagattccacacacggacggacattttcacccctctcccctcatgggtggattcggacttaaacaccctcctccacagattctcatcaagaacaccccggtacctgcgaatccttcgaccaccttcagtgcggcaaagtttgcttccttcatcacacagtactccacgggacaggtcagcgtggagatcgagtgggagctgcagaaggaaaacagcaaacgctggaatcccgaaattcagtacacttccaactacaacaagtctgttaatgtggactttactgtggacactaatggcgtgtattcagagcctcgccccattggcaccagatacctgactcgtaatctgtaa

SEQ ID NO: 2032 - DNA, 2208 bp, Artificial Sequence
  Synthetic Polynucleotide
atggctgccgatggttatcttccagattggctcgaggacattctctctgaaggaataagacagtggtggaagctcaaacctggcccaccaccgccaaagcccgcagagcggcacaaggacgccagtaggggtcttgtgcttcctgggtacaagtacctcggacccttcaacggactcgacaaaggagagccggtcaacgaggcagacgccgcggccctcgagcacgacaaggcctacgaccggcagctcgacagcggagacaacccgtacctcaagtacaaccacgccgacgcggagtttcaggagcgtcttaaagaagatacgtcttttgggggcaacctcggacgagcagtattccaggcgaaaaagagggttcttgaacctctgggcctggttgaggagcctgttaagacggctccgggaaaaaagaggccggtagagcactctcctgtggagccagactcctcctcgggaaccggaaaagcgggccagcagcctgcaagaaaaagattgaattttggtcagactggagacgcagactccgtacctgacccccagcctctcggacagccaccagcagcccccacaagtttgggatctactacaatggctacaggcagtggcgcaccaatggcagacaataacgagggtgccgatggagtgggtaattcctcaggaaattggcattgcgattcccaatggctgggcgacagagtcatcaccaccagcacccgaacctgggccctgcccacctacaacaaccacctctacaagcaaatctccagccaatcaggagcatcgaacgacaaccactactttggctacagcaccccttgggggtattttgacttcaacagattccactgtcacttctccccacgtgactggcaaagactcatcaacaacaactggggattccgacccaagagactcaacttcaagctctttaacattcaagtcaaagaggtcacgcagaatgacggtacgacgacgattgccaataaccttaccagcacggttcaggtgtttactgactcggagtaccagctcccgtacgtcctcggctcggcgcatcaaggatgcctcccgccgttcccagcagacgtcttcatggtgccacagtatggatacctcaccctgaacaacgggagtcaggcagtaggacgctcttcattttactgcctggagtactttccttctcagatgctgcgtaccggaaacaactttaccttcagctacacttttgaggacgttcctttccacagcagctacgctcacagccagagtctggaccgtctcatgaatcctctcatcgaccagtacctgtattacttgagcagaacaaacactccaagtggaaccaccacgcagtcaaggcttcagttttctcaggccggagcgagtgacattcgggaccagtctaggaactggcttcctggaccctgttaccgccagcagcgagtatcaaagacatctgcggataacaacaacagtgaatactcgtggactggagctaccaagtaccacctcaatggcagagactctctggtgaatccgggcccggccatggcaagccacaaggacgatgaagaaaagttttttcctcagagcggggttctcatctttgggaagcaaggctcagagaaaacaaatgtggacattgaaaaggtcatgattacagacgaagaggaaatcaggacaaccaatcccgtggctacggagcagtatggttctgtatctaccaacctccagagaggcaacagacaagcagctaccgcagatgtcaacacacaaggcgttcttccaggcatggtctggcaggacagagatgtgtaccttcaggggcccatctgggcaaagattccacacacggacggacattttcacccctctcccctcatgggtggattcggacttaaacaccctcctccacagattctcatcaagaacaccccggtacctgcgaatccttcgaccaccttcagtgcggcaaagtttgcttccttcatcacacagtactccacgggacaggtcagcgtggagatcgagtgggagctgcagaaggaaaacagcaaacgctggaatcccgaaattcagtacacttccaactacaacaagtctgttaatgtggactttactgtggacactaatggcgtgtattcagagcctcgccccattggcaccagatacctgactcgtaatctgtaa

SEQ ID NO: 2033 - DNA, 2208 bp, Artificial Sequence
  Synthetic Polynucleotide
atggctgccgatggttatcttccagattggctcgaggacactctctctgaaggaataagacagtggtggaagctcaaacctggcccaccaccgccaaagcccgcagagcggcacaaggacgccagtaggggtcttgtgcttcctgggtacaagtacctcggacccttcaacggactcgacaaaggagagccggtcaacgaggcagacgccgcggccctcgagcacgacaaggcctacgaccggcagctcgacagcggagacaacccgtacctcaagtacaaccacgccgacgcggagtttcaggagcgtcttaaagaagatacgtcttttgggggcaacctcggacgagcagtattccaggcgaaaaagagggttcttgaacctctgggcctggttgaggagcctgttaagacggctccgggaaaaaagaggccggtagagcactctcctgtggagccagactcctcctcgggaaccggaaaagcgggccagcagcctgcaagaaaaagattgaattttggtcagactggagacgcagactcagtacctgacccccagcctctcggacagccaccagcagccccctctggtctgggaactaatacgatggctacaggcagtggcgcaccaatggcagacaataacgagggcgccgacggagtgggtaattcctcgggaaattggcattgcgattccacatggatgggcgacagagtcatcaccaccagcacccgaacctgggccctgcccacctacaacaaccacctctacaaacaaatttccagccaatcaggagcctcgaacgacaatcactactttggctacagcaccccttgggggtattttgacttcaacagattccactgccacttttcaccacgtgactggcaaagactcatcaacaacaactggggattccgacccaagagactcaacttcaagctctttaacattcaagtcaaagaggtcacgcagaatgacggtacgacgacgattgccaataaccttaccagcacggttcaggtgtttactgactcggagtaccagctcccgtacgtcctcggctcggcgcatcaaggatgcctcccgccgttcccagcagacgtcttcatggtgccacagtatggatacctcaccctgaacaacgggagtcaggcagtaggacgctcttcattttactgcctggagtactttccttctcagatgctgcgtaccggaaacaactttaccttcagctacacttttgaggacgttcctttccacagcagctacgctcacagccagagtctggaccgtctcatgaatcctctcatcgaccagtacctgtattacttgagcagaacaaacactccaagtggaaccaccacgcagtcaaggcttcagttttctcaggccggagcgagtgacattcgggaccagtctaggaactggcttcctggaccctgttaccgccagcagcgagtatcaaagacatctgcggataacaacaacagtgaatactcgtggactggagctaccaagtaccacctcaatggcagagactctctggtgaatccgggcccggccatggcaagccacaaggacgatgaagaaaagttttttcctcagagcggggttctcatctttgggaagcaaggctcagagaaaacaaatgtggacattgaaaaggtcatgattacagacgaagaggaaatcaggacaaccaatcccgtggctacggagcagtatggttctgtatctaccaacctccagagaggcaacagacaagcagctaccgcagatgtcaacacacaaggcgttcttccaggcatggtctggcaggacagagatgtgtaccttcaggggcccatctgggcaaagattccacacacggacggacattttcacccctctcccctcatgggtggattcggacttaaacaccctcctccacagattctcatcaagaacaccccggtacctgcgaatccttcgaccaccttcagtgcggcaaagtttgcttccttcatcacacagtactccacgggacaggccagcgtggagatcgagtgggagctgcagaaggaaaacagcaaacgctggaatcccgaaattcagtacacttccaactacaacaagtctgttaatgtggactttactgtggacactaatggcgtgtattcagagcctcgccccattggcaccagatacctgactcgtaatctgtaa

SEQ ID NO: 2034 - DNA, 2208 bp, Artificial Sequence
  Synthetic Polynucleotide
atggctgccgatggttatcttccagattggctcgaggacactctctctgaaggaataagacagtggtggaagctcaaacctggcccaccaccaccaaagcccgcagagcggcataaggacgacagcaggggtcttgtgcttcctgggtacaagtacctcggacccttcaacggactcgacaagggagagccggtcaacgaggcagacgccgcggccctcgagcacgacaaagcctacgaccggcagctcgacagcggagacaacccgtacctcaagtacaaccacgccgacgcggagtttcaggagcgccttaaagaagatacgtcttttgggggcaacctcggacgagcagtattccaggcgaaaaagagggttcttgaacctctgggcctggttgaggagcctgttaagacggctccgggaaaaaagaggccggtagagcactctcctgtggagccagactcctcctcgggaaccggaaaagcgggccagcagcctgcaagaaaaagattgaattttggtcagactggagacgcagactccgtacctgacccccagcctctcggacagccaccagcagcccccacaagtttgggatctactacaatggctacaggcagtggcgcaccaatggcagacaataacgagggtgccgatggagtgggtaattcctcrggaaattggcattgcgattccacatggatgggcgacagagtcatcaccaccagcacccgaacctgggccctgcccacctacaacaaccacctctacaaacaaatttccagccaatcaggagcctcgaacgacaatcactactttggctacagcaccccttgggggtattttgacttcaacagattccactgccacttttcaccacgtgactggcaaagactcatcaacaacaactggggattccgacccaagagactcaacttcaagctctttaacattcaagtcaaagaggtcacgcagaatgacggtacgacgacgattgccaataaccttaccagcacggttcaggtgtttactgactcggagtaccagctcccgtacgtcctcggctcggcgcatcaaggatgcctcccgccgttcccagcagacgtcttcatggtgccacagtatggatacctcaccctgaacaacgggagtcaggcagtaggacgctcttcattttactgcctggagtactttccttctcagatgctgcgtaccggaaacaactttaccttcagctacacttttgaggacgttcctttccacagcagctacgctcacagccagagtctggaccgtctcatgaatcctctcatcgaccagtacctgtattacttgagcagaacaaacactccaagtggaaccaccacgcagtcaaggcttcagttttctcaggccggagcgagtgacattcgggaccagtctaggaactggcttcctggaccctgttaccgccagcagcgagtatcaaagacatctgcggataacaacaacagtgaatactcgtggactggagctaccaagtaccacctcaatggcagagactctctggtgaatccgggcccggccatggcaagccacaaggacgatgaagaaaagttttttcctcagagcggggttctcatctttgggaagcaaggctcagagaaaacaaatgtggacattgaaaaggtcatgattacagacgaagaggaaatcaggacaaccaatcccgtggctacggagcagtatggttctgtatctaccaacctccagagaggcaacagacaagcagctaccgcagatgtcaacacacaaggcgttcttccaggcatggtctggcaggacagagatgtgtaccttcaggggcccatctgggcaaagattccacacacggacggacattttcacccctctcccctcatgggtggattcggacttaaacaccctcctccacagattctcatcaagaacaccccggtacctgcgaatccttcgaccaccttcagtgcggcaaagtttgcttccttcatcacacagtactccacgggacaggccagcgtggagatcgagtgggagctgcagaaggaaaacagcaaacgctggaatcccgaaattcagtacacttccaactacaacaagtctgttaatgtggactttactgtggacactaatggcgtgtattcagagcctcgccccattggcaccagatacctgactcgtaatctgtaa

SEQ ID NO: 2035 - DNA, 2208 bp, Artificial Sequence
  Synthetic Polynucleotide
atggctgccgatggttatcttccagattggctcgaggacactctctctgaaggaataagacagtggtggaagctcaaacctggcccaccaccgccaaagcccgcagagcggcacaaggacgccagtaggggtcttgtgcttcctgggtacaagtacctcggacccttcaacggactcgacaaaggagagccggtcaacgaggcagacgccgcggccctcgagcacgacaaggcctacgaccggcagctcgacagcggagacaacccgtacctcaagtacaaccacgccgacgcggagtttcaggagcgtcttaaagaagatacgtcttttgggggcaacctcggacgagcagtattccaggcgaaaaagagggttcttgaacctctgggcctggttgaggaacctgttaagacggctccgggaaaaaagaggccggtagagcactctcctgtggagccagactcctcctcgggaaccggaaaggcgggccagcagcctgcaagaaaaagattgaattttggtcagactggagacgcagactcagtacctgacccccagcctctcggacagccaccagcagccccctctggtctgggaactaatacgatggctacaggcagtggcgcaccaatggcagacaataacgagggcgccgacggagtgggtaattcctcgggaaattggcattgcgattccacatggatgggcgacagagtcatcaccaccagcacccgaacctgggccctgcccacctacaacaaccacctctacaaacaaatttccagccaatcaggagcctcgaacgacaatcactactttggctacagcaccccttgggggtattttgacttcaacagattccactgccacttttcaccacgtgactggcaaagactcatcaacaacaactggggattccgacccaagagactcaacttcaagctctttaacattcaagtcaaagaggtcacgcagaatgacggtacgacgacgattgccaataaccttaccagcacggttcaggtgtttactgactcggagtaccagctcccgtacgtcctcggctcggcgcatcaaggatgcctcccgccgttcccagcagacgtcttcatggtgccacagtatggatacctcaccctgaacaacgggagtcaggcagtaggacgctcttcattttactgcctggagtactttccttctcagatgctgcgtaccggaaacaactttaccttcagctacacttttgaggacgttcctttccacagcagctacgctcacagccagagtctggaccgtctcatgaatcctctcatcgaccagtacctgtattacttgagcagaacaaacactccaagtggaaccaccacgcagtcaaggcttcagttttctcaggccggagcgagtgacattcgggaccagtctaggaactggcttcctggaccctgttaccgccagcagcgagtatcaaagacatctgcggataacaacaacagtgaatactcgtggactggagctaccaagtaccacctcaatggcagagactctctggtgaatccgggcccggccatggcaagccacaaggacgatgaagaaaagttttttcctcagagcggggttctcatctttgggaagcaaggctcagagaaaacaaatgtggacattgaaaaggtcatgattacagacgaagaggaaatcaggacaaccaatcccgtggctacggagcagtatggttctgtatctaccaacctccagagaggcaacaggcaagcagctaccgcagatgtcaacacacaaggcgttcttccaggcatggtctggcaggacagagatgtgtaccttcaggggcccatctgggcaaagattccacacacggacggacattttcacccctctcccctcatgggtggattcggacttaaacaccctcctccacagattctcatcaagaacaccccggtacctgcgaatccttcgaccaccttcagtgcggcaaagtttgcttccttcatcacacagtactccacgggacaggtcagcgtggagatcgagtgggagctgcagaaggaaaacagcaaacgctggaatcccgaaattcagtacacttccaactacaacaagtctgttaatgtggactttactgtggacactaatggcgtgtattcagagcctcgccccattggcaccagatacctgactcgtaatctgtaa

SEQ ID NO: 2036 - DNA, 2208 bp, Artificial Sequence
  Synthetic Polynucleotide
atggctgccgatggttatcttccagattggctcgaggacactctctctgaaggaataagacagtggtggaagctcaaacctggcccaccaccgccaaagcccgcagagcggcacaaggacgccagtaggggtcttgtgcttcctgggtacaagtacctcggacccttcaacggactcgacaaaggagagccggtcaacgaggcagacgccgcggccctcgagcacgacaaggcctacgaccggcagctcgacagcggagacaacccgtacctcaagtacaaccacgccgacgcggagtttcaggagcgtcttaaagaagatacgccttttgggggcaacctcggacgagcagtattccaggcgaaaaagagggttcttgaacctctgggcctggttgaggagcctgttaagacggctccgggaaaaaagaggccggtagagcactctcctgtggagccagactcctcctcgggaaccggaaaagcgggccagcggcctgcaagaaaaagattgaattttggtcagactggagacgcagactccgtacctgacccccagcctctcggacagccaccagcagcccccacaagtttgggatctactacaatggctacaggcagtggcgcaccaatggcagacaataacgagggtgccgatggagtgggtaattcctcaggaaattggcattgcgattcccaatggctgggcgacagagtcatcaccaccagcacccgaacctgggccctgcccacctacaacaaccacctctacaagcaaatccccagccaatcaggagcatcgaacgacaaccactactttggctacagcaccccttgggggtattttgacttcaacagattccactgtcacttctccccacgtgactggcaaagactcatcaacaacaactggggattccgacccaagagactcaacttcaagctctttaacattcaagtcaaagaggtcacgcagaatgacggtacgacgacgattgccaataaccttaccagcacggttcaggtgtttactgactcggagtaccagctcccgtacgtcctcggctcggcgcatcaaggatgcctcccgccgttcccagcagacgtcttcatggtgccacagtatggatacctcaccctgaacaacgggagtcaggcagtaggacgctcttcattttactgcctggagtactttccttctcagatgctgcgtaccggaaacaactttaccttcagctacacttttgaggacgttcctttccacagcagctacgctcacagccagagtctggaccgtctcatgaatcctctcatcgaccagtacctgtattacttgagcagaacaaacactccaagtggaaccaccacgcagtcaaggcttcagttttctcaggccggagcgagtgacattcgggaccagtctaggaactggcttcctggaccctgttaccgccagcagcgagtatcaaagacatctgcggataacaacaacagtgaatactcgtggactggagctaccaagtaccacctcaatggcagagactctctggtgaatccgggcccggccatggcaagccacaaggacgatgaagaaaagttttttcctcagagcggggttctcatctttgggaagcaaggctcagagaaaacaaatgtggacattgaaaaggtcatgattacagacgaagaggaaatcaggacaaccaatcccgtggctacggagcagtatggttctgtatctaccaacctccagagaggcaacagacaagcagctaccgcagatgtcaacacacaaggcgttcttccaggcatggtctggcaggacagagatgtgtaccttcaggggcccatctgggcaaagattccacacacggacggacattttcacccctctcccctcatgggtggattcggacttaaacaccctcctccacagattctcatcaagaacaccccggtacctgcgaatccttcgaccaccttcagtgcggcaaagtttgcttccttcatcacacagtactccacgggacaggccagcgtggagatcgagtgggagctgcagaaggaaaacagcaaacgctggaatcccgaaattcagtacacttccaactacaacaagtctgttaatgtggactttactgtggacactaatggcgtgtattcagagcctcgccccattggcaccagatacctgactcgtaatctgtaa

SEQ ID NO: 2037 - DNA, 2208 bp, Artificial Sequence
  Synthetic Polynucleotide
atggctgccgatggttatcttccagattggctcgaggacactctctctgaaggaataagacagtggtggaagctcaaacctggcccaccaccgccaaagcccgcagagcggcacaaggacgacagtaggggtcttgtgcttcctgggtacaagtacctcggacccttcaacggactcgacaaaggagagccggtcaacgaggcagacgccgcggccctcgagcacgacaaggcctacgaccggcagctcgacagcggagacaacccgtacctcaagtacaaccacgccgacgcggagtttcaggagcgtcttaaagaagatacgtcttttgggggcaacctcggacgagcagtattccaggcgaaaaagagggttcttgaacctctgggcctggttgaggagcctgttaagacggctccgggaaaaaagaggccggtagagcactctcctgtggagccagactcctcctcgggaaccggaaaagcgggccagcagcctgcaagaaaaagattgaattttggtcagactggagacgcagactccgtacctgacccccagcctctcggacagccaccagcagcccccacaagtttgggatctactacaatggctacaggcagtggcgcaccaatggcagacaataacgagggtgccgatggagtgggtaattcctcaggaaattggcattgcgattccacatggatgggcgacagagtcatcaccaccagcacccgaacctgggccctgcccacctacaacaaccacctctacaaacaaatttccagccaatcaggagcctcgaacgacaatcactactttggctacagcaccccttgggggtattttgacttcaacagattccactgccacttttcaccacgtgactggcaaagactcatcaacaacaactggggattccgacccaagagactcaacttcaagctctttaacattcaagtcaaagaggtcacgcagaatgacggtacgacgacgattgccaataaccttaccagcacggttcaggtgtttactgactcggagtaccagctcccgtacgtcctcggctcggcgcatcaaggatgcctcccgccgttcccagcagacgtcttcatggtgccacagtatggatacctcaccctgaacaacgggagtcaggcagtaggacgctcttcattttactgcctggagtactttccttctcagatgctgcgtaccggaaacaactttaccttcagctacacttttgaggacgttcctttccacagcagctacgctcacagccagagtctggaccgtctcatgaatcctctcaccgaccagtacctgtattacttgagcagaacaaacactccaagtggaaccaccacgcagtcaaggcttcagttttctcaggccggagcgagtgacattcgggaccagtctaggaactggcttcctggaccctgttaccgccagcagcgagtatcaaagacatctgcggataacaacaacagtgaatactcgtggactggagctaccaagtaccacctcaatggcagagactctctggtgaatccgggcccggccatggcaagccacaaggacgatgaagaaaagttttttcctcagagcggggttctcatctttgggaagcaaggctcagagaaaacaaatgtggacattgaaaaggtcatgattacagacgaagaggaaatcaggacaaccaatcccgtggctacggagcagtatggttctgtatctaccaacctccagagaggcaacagacaagcagctaccgcagatgtcaacacacaaggcgttcttccaggcatggtctggcaggacagagatgtgtaccttcaggggcccatctgggcaaagattccacacacggacggacattttcacccctctcccctcatgggtggattcggacttaaacaccctcctccacagattctcatcaagaacaccccggtacctgcgaatccttcgaccaccttcagtgcggcaaagtttgcttccttcatcacacagtactccacgggacaggtcagcgtggagatcgagtgggagctgcagaaggaaaacagcaaacgctggaatcccgaaattcagtacacttccaactacaacaagtctgttaatgtggactttactgtggacactaatggcgtgtattcagagcctcgccccattggcaccagatacctgactcgtaatctgtaa

SEQ ID NO: 2038 - DNA, 2208 bp, Artificial Sequence
  Synthetic Polynucleotide
atggctgccgatggttatcttccagattggctcgaggacactctctctgaaggaataagacagtggtggaagctcaaacctggcccaccaccaccaaagcccgcagagcggcataaggacgacagcaggggtcttgtgcttcctgggtacaagtacctcggacccttcaacggactcgacaagggagagccggtcaacgaggcagacgccgcggccctcgagcacgacaaagcctacgaccggcagctcgacagcggagacaacccgtacctcaagtacaaccacgccgacgcggagtttcaggagcgccttaaagaagatacgtcttttgggggcaacctcggacgagcagtcttccaggcgaaaaagagggttcttgaacctctgggcctggttgaggaacctgttaagacggctccgggaaaaaagaggccggtagagcactctcctgtggagccagactcctcctcgggaaccggaaaggcgggccagcagcctgcaagaaaaagattgaattttggtcagactggagacgcagactcagtacctgacccccagcctctcggacagccaccagcagccccctctggtctgggaactaatacgatggctacaggcagtggcgcaccaatggcagacaataacgagggcgccgacggagtgggtaattcctcgggaaattggcattgcgattccacatggatgggcgacagagtcatcaccaccagcacccgaacctgggccctgcccacctacaacaaccacctctacaaacaaatttccagccaatcaggagcctcgaacgacaatcactactttggctacagcaccccttgggggtattttgacttcaacagattccactgccacttttcaccacgtgactggcaaagactcatcaacaacaactggggattccgacccaagagactcaacttcaagctctttaacattcaagtcaaagaggtcacgcagaatgacggtacgacgacgattgccaataaccttaccagcacggttcaggtgtttactgactcggagtaccagctcccgtacgtcctcggctcggcgcatcaaggatgcctcccgccgttcccagcagacgtcttcatggtgccacagtatggatacctcaccctgaacaacgggagtcaggcagtaggacgctcttcattttactgcctggagtactttccttctcagatgctgcgtaccggaaacaactttaccttcagctacacttttgaggacgttcctttccacagcagctacgctcacagccagagtctggaccgtctcatgaatcctctcatcgaccagtacctgtattacttgagcagaacaaacactccaagtggaaccaccgcgcagtcaaggcttcagttttctcaggccggagcgagtgacattcgggaccagtctaggaactggcttcctggaccctgttaccgccagcagcgagtatcaaagacatctgcggataacaacaacagtgaatactcgtggactggagctaccaagtaccacctcaatggcagagactctctggtgaatccgggcccggccatggcaagccacaaggacgatgaagaaaagttttttcctcagagcggggttctcatctttgggaagcaaggctcagagaaaacaaatgtggacattgaaaaggtcatgattacagacgaagaggaaatcaggacaaccaatcccgtggctacggagcagtatggttctgtatctaccaacctccagagaggcaacagacaagcagctaccgcagatgtcaacacacaaggcgttcttccaggcatggtctggcaggacagagatgtgtaccttcaggggcccatctgggcaaagattccacacacggacggacattttcacccctctcccctcatgggtggattcggacttaaacaccctcctccacagattctcatcaagaacaccccggtacctgcgaatccttcgaccaccttcagtgcggcaaagtttgcttccttcatcacacagtactccacgggacaggtcagcgtggagatcgagtgggagctgcagaaggaaaacagcaaacgctggaatcccgaaattcagtacacttccaactacaacaagtctgttaatgtggactttactgtggacactaatggcgtgtattcagagcctcgccccattggcaccagatacctgactcgtaatctgtaa

SEQ ID NO: 2039 - DNA, 2208 bp, Artificial Sequence
  Synthetic Polynucleotide
atggctgccgatggttatcttccagattggctcgaggacactctctctgaaggaataagacagtggtggaagctcaaacctggcccaccaccaccaaagcccgcagagcggcataaggacgacagcaggggtcttgtgcttcctgggtacaagtacctcggacccttcaacggactcgacaagggagagccggtcaacgaggcagacgccgcggccctcgagcacgacaaagcctacgaccggcagctcgacagcggagacaacccgtacctcaagtacaaccacgccgacgcggagtttcaggagcgccttaaagaagatacgtcttttgggggcaacctcggacgagcagtcttccaggcgaaaaagagggttcttgaacctctgggcctggttgaggaacctgttaagacggctccgggaaaaaagaggccggtagagcactctcctgtggagccagactcctcctcgggaaccggaaaggcgggccagcagcctgcaagaaaaagattgaattttggtcagactggagacgcagactcagtacctgacccccagcctctcggacagccaccagcagccccctctggtctgggaactaatacgatggctacaggcagtggcgcaccaatggcagacaataacgagggcgccgacggagtgggtaattcctcgggaaattggcattgcgattccacatggatgggcgacagagtcatcaccaccagcacccgaacctgggccctgcccacctacaacaaccacctctacaaacaaatttccagccaatcaggagcctcgaacggcaatcactactttggctacagcaccccttgggggtattttgacttcaacagattccactgccacttttcaccacgtgactggcaaagactcatcaacaacaactggggattccgacccaagagactcaacttcaagctctttaacattcaagtcaaagaggtcacgcagaatgacggtacgacgacgattgccaataaccttaccagcacggttcaggtgtttactgactcggagtaccagctcccgtacgtcctcggctcggcgcatcaaggatgcctcccgccgttcccagcagacgtcttcatggtgccacagtatggatacctcaccctgaacaacgggagtcaggcagtaggacgctcttcattttactgcctggagtactttccttctcagatgctgcgtaccggaaacaactttaccttcagctacacttttgaggacgttcctttccacagcagctacgctcacagccagagtctggaccgtctcatgaatcctctcatcgaccagtacctgtattacttgagcagaacaaacactccaagtggaaccaccacgcagtcaaggcttcagttttctcaggccggagcgagtgacattcgggaccagtctaggaactggcttcctggaccctgttaccgccagcagcgagtatcaaagacatctgcggataacaacaacagtgaatactcgtggactggagctaccaagtaccacctcaatggcagagactctctggtgaatccgggcccggccatggcaagccacaaggacgatgaagaaaagttttttcctcagagcggggttctcatctttgggaagcaaggctcagagaaaacaaatgtggacattgaaaaggtcatgattacagacgaagaggaaatcaggacaaccaatcccgtggctacggagcagtatggttctgtatctaccaacctccagagaggcaacagacaagcagctaccgcagatgtcaacacacaaggcgttcttccaggcatggtctggcaggacagagatgtgtaccttcaggggcccatctgggcaaagattccacacacggacggacattttcacccctctcccctcatgggtggattcggacttaaacaccctcctccacagattctcatcaagaacaccccggtacctgcgaatccttcgaccaccttcagtgcggcaaagtttgcttccttcatcacacagtactccacgggacaggtcagcgtggagatcgagtgggagctgcagaaggaaaacagcaaacgctggaatcccgaaattcagtacacttccaactacaacaagtctgttaatgtggactttactgtggacactaatggcgtgtattcagagcctcgccccattggcaccagatacctgactcgtaatctgtaa

SEQ ID NO: 2040 - DNA, 2208 bp, Artificial Sequence
  Synthetic Polynucleotide
atggctgccgatggttatcttccagattggctcgaggacactctctctgaaggaataagacagtggtggaagctcaaacctggcccaccaccaccaaagcccgcagagcggcataaggacgacagcaggggtcttgtgcttcctgggtacaagtacctcggacccttcaacggactcgacaagggagagccggtcaacgaggcagacgccgcggccctcgagcacgacaaagcctacgaccggcagctcgacagcggagacaacccgtacctcaagtacaaccacgccgacgcggagtttcaggagcgccttaaagaagatacgtcttttgggggcaacctcggacgagcagtcttccaggcgaaaaagagggttcttgaacctctgggcctggttgaggaacctgttaagacggctccgggaaaaaagaggccggtagagcactctcctgtggagccagactcctcctcgggaaccggaaaggcgggccagcagcctgcaagaaaaagattgaattttggtcagactggagacgcagactcagtacctgacccccagcctctcggacagccaccagcagccccctctggtctgggaactaatacgatggctacaggcagtggcgcaccaatggcagacaataacgagggcgccgacggagtgggtaattcctcgggaaattggcattgcgattccacatggatgggcgacagagtcatcaccaccagcacccgaacctgggccctgcccacctacaacaaccacctctacaaacaaatttccagccaatcaggagcctcgaacgacaatcactactttggctacagcaccccttgggggtattttgacttcaacagattccactgccacttttcaccacgtgactggcaaagactcatcaacaacaactggggattccgacccaagagactcaacttcaagctctttaacattcaagtcaaagaggtcacgcagaatgacggtacgacgacgattgccaataaccttaccagcacggttcaggtgtttactgactcggagtaccagctcccgtacgtcctcggctcggcgcatcaaggatgcctcccgccgttcccagcagacgtcttcatggtgccacagtatggatacctcaccctgaacaacgggagtcaggcagtaggacgctcttcattttactgcctggagtactttccttctcagatgctgcgtaccggaaacaactttaccttcagctacacttttgaggacgttcctttccacagcagctacgctcacagccagagtctggaccgtctcatgaatcctctcatcgaccagtacctgtattacttgagcagaacaaacactccaagtggaaccaccacgcagtcaaggcttcagttttctcaggccggagcgagtgacattcgggaccagtctaggaactggcttcctggaccctgttaccgccagcagcgagtatcaaagacatctgcggataacaacaacagtgaatactcgtggactggagctaccaagtaccacctcaatggcagagactctctggtgaatccgggcccggccatggcaagccacaaggacgatgaagaaaagttttttcctcagagcggggttctcatctttgggaagcaaggctcagagaaaacaaatgtggacattgaaagggtcatgattacagacgaagaggaaatcaggacaaccaatcccgtggctacggagcagtatggttctgtatctaccaacctccagagaggcaacagacaagcagctaccgcagatgtcaacacacaaggcgttcttccaggcatggtctggcaggacagagatgtgtaccttcaggggcccatctgggcaaagattccacacacggacggacattttcacccctctcccctcatgggtggattcggacttaaacaccctcctccacagattctcatcaagaacaccccggtacctgcgaatccttcgaccaccttcagtgcggcaaagtttgcttccttcatcacacagtactccacgggacaggtcagcgtggagatcgagtgggagctgcagaaggaaaacagcaaacgctggaatcccgaaattcagtacacttccaactacaacaagtctgttaatgtggactttactgtggacactaatggcgtgtattcagagcctcgccccattggcaccagatacctgactcgtaatctgtaa

SEQ ID NO: 2041 - DNA, 2208 bp, Artificial Sequence
  Synthetic Polynucleotide
atggctgccgatggttatcttccagattggctcgaggacactctctctgaaggaataagacagtggtggaagctcaaacctggcccaccaccaccaaagcccgcagagcggcataaggacgacagcaggggtcttgtgcttcctgggtacaagtacctcggacccttcaacggactcgacaagggagagccggtcaacgaggcagacgccgcggccctcgagcacgacaaagcctacgaccggcagctcgacagcggagacaacccgtacctcaagtacaaccacgccgacgcggagtttcaggagcgccttaaagaagatacgtcttttgggggcaacctcggacgagcagtcttccaggcgaaaaagagggttcttgaacctctgggcctggttgaggaacctgttaagacggctccgggaaaaaagaggccggtagagcactctcctgtggagccagactcctcctcgggaaccggaaaggcgggccagcagcctgcaagaaaaagattgaattttggtcagactggagacgcagactcagtacctgacccccagcctctcggacagccaccagcagccccctctggtctgggaactaatacgatggctacaggcagtggcgcaccaatggcagacaataacgagggcgccgacggagtgggtaattcctcgggaaattggcattgcgattccacatggatgggcgacagagtcatcaccaccagcacccgaacctgggccctgcccacctacaacaaccacctctacaaacaaatttccagccaatcaggagcctcgaacgacaatcactgctttggctacagcaccccttgggggtattttgacttcaacagattccactgccacttttcaccacgtgactggcaaagactcatcaacaacaactggggattccgacccaagagactcaacttcaagctctttaacattcaagtcaaagaggtcacgcagaatgacggtacgacgacgattgccaataaccttaccagcacggttcaggtgtttactgactcggagtaccagctcccgtacgtcctcggctcggcgcatcaaggatgcctcccgccgttcccagcagacgtcttcatggtgccacagtatggatacctcaccctgaacaacgggagtcaggcagtaggacgctcttcattttactgcctggagtactttccttctcagatgctgcgtaccggaaacaactttaccttcagctacacttttgaggacgttcctttccacagcagctacgctcacagccagagtctggaccgtctcatgaatcctctcatcgaccagtacctgtattacttgagcagaacaaacactccaagtggaaccaccacgcagtcaaggcttcagttttctcaggccggagcgagtgacattcgggaccagtctaggaactggcttcctggaccctgttaccgccagcagcgagtatcaaagacatctgcggataacaacaacagtgaatactcgtggactggagctaccaagtaccacctcaatggcagagactctctggtgaatccgggcccggccatggcaagccacaaggacgatgaagaaaagttttttcctcagagcggggttctcatctttgggaagcaaggctcagagaaaacaaatgtggacattgaaaaggtcatgattacagacgaagaggaaatcaggacaaccaatcccgtggctacggagcagtatggttctgtatctaccaacctccagagaggcaacagacaagcagctaccgcagatgtcaacacacaaggcgttcttccaggcatggtctggcaggacagagatgtgtaccttcaggggcccatctgggcaaagattccacacacggacggacattttcacccctctcccctcatgggtggattcggacttaaacaccctcctccacagattctcatcaagaacaccccggtacctgcgaatccttcgaccaccttcagtgcggcaaagtttgcttccttcatcacacagtactccacgggacaggtcagcgtggagatcgagtgggagctgcagaaggaaaacagcaaacgctggaatcccgaaattcagtacacttccaactacaacaagtctgttaatgtggactttactgtggacactaatggcgtgtattcagagcctcgccccattggcaccagatacctgactcgtaatctgtaa

SEQ ID NO: 2042 - DNA, 2208 bp, Artificial Sequence
  Synthetic Polynucleotide
atggctgccgatggttatcttccagattggctcgaggacactctctctgaaggaataagacagtggtggaagctcaaacctggcccaccaccaccaaagcccgcagagcggcataaggacgacagcaggggtcttgtgcttcctgggtacaagtacctcggacccttcaacggactcgacaagggagagccggtcaacgaggcagacgccgcggccctcgagcacgacaaagcctacgaccggcagctcgacagcggagacaacccgtacctcaagtacaaccacgccgacgcggagtttcaggagcgccttaaagaagatacgtcttttgggggcaacctcggacgagcagtcttccaggcgaaaaagagggttcttgaacctctgggcctggttgaggaacctgttaagacggctccgggaaaaaagaggccggtagagcactctcctgtggagccagactcctcctcgggaaccggaaaggcgggccagcagcctgcaagaaaaagattgaattttggtcagactggagacgcagactcagtacctgacccccagcctctcggacagccaccagcagccccctctggtctgggaactaatacgatggctacaggcagtggcgcaccaatggcagacaataacgagggcgccgacggagtgggtaattcctcgggaaattggcattgcgattccacatggatgggcgacagagtcatcaccaccagcacccgaacctgggccctgcccacctacaacaaccacctctacaaacaaatttccagccaatcaggagcctcgaacgacaatcactactttggctacagcaccccttgggggtattttgacttcaacagattccactgccacttttcaccacgtgactggcaaagactcatcaacaacaactggggattccgacccaagagactcaacttcaagctctttaacattcaagtcaaagaggtcacgcagaatgacggtacgacgacgattgccaataaccttaccagcacggttcaggtgtttactgactcggagtaccagctcccgtacgtcctcggctcggcgcatcaaggatgcctcccgccgttcccagcagacgtcttcatggtgccacagtatggatacctcaccctgaacaacgggagtcaggcagtaggacgctcttcattttactgcctggagtactttccttctcagatgctgcgtaccggaaacaactttaccttcagctacacttttgaggacgttcctttccacagcagctacgctcacagccagagtctggaccgtctcatgaatcctctcatcgaccagtacctgtattacttgagcagaacaaacactccaagtggaaccaccacgcagtcaaggcttcagttttctcaggccggagcgagtgacattcgggaccagtctaggaactggcttcctggaccctgttaccgccagcagcgagtatcaaagacatctgcggataacaacaacagtgaatactcgtggactggagctaccaagtaccacctcaatggcagagactctctggtgaatccgggcccggccatggcaagccacaaggacgatgaagaaaagttttttcctcagagcggggttctcatctttgggaagcaaggctcagagaaaacaaatgtggacattgaaaaggtcatgattacagacgaagaggaaatcaggacaaccaatcccgtggctacggagcagtatggttctgtatctaccaacctccagagaggcaacagacaagcagctaccgcagatgtcaacacacaaggcgttcttccaggcatggtctggcaggacagagatgtgtaccttcaggggcccatctgggcaaagattccacacacggacggacattttcacccctctcccctcatgggtggattcggacttaaacaccctcctccacagattctcatcaagaacaccccggtacctgcgaatccttcgaccaccttcagtgcggcaaagtttgcttccttcatcacacagtactccacgggacaggtcagcgtggagatcgagtgggagctgcagaaggaaaacagcaaacgctggaatcccgaaattcagtacacttccaactacaacaagtctgttaatgcggactttactgtggacactaatggcgtgtattcagagcctcgccccattggcaccagatacctgactcgtaatctgtaa

SEQ ID NO: 2043 - DNA, 2208 bp, Artificial Sequence
  Synthetic Polynucleotide
atggctgccgatggttatcttccagattggctcgaggacactctctctgaaggaataagacagtggtggaagctcaaacctggcccaccaccaccaaagcccgcagagcggcatagggacgacagcaggggtcttgtgcttcctgggtacaagtacctcggacccttcaacggactcgacaagggagagccggtcaacgaggcagacgccgcggccctcgagcacgacaaagcctacgaccggcagctcgacagcggagacaacccgtacctcaagtacaaccacgccgacgcggagtttcaggagcgccttaaagaagatacgtcttttgggggcaacctcggacgagcagtcttccaggcgaaaaagagggttcttgaacctctgggcctggttgaggaacctgttaagacggctccgggaaaaaagaggccggtagagcactctcctgtggagccagactcctcctcgggaaccggaaaggcgggccagcagcctgcaagaaaaagattgaattttggtcagactggagacgcagactcagtacctgacccccagcctctcggacagccaccagcagccccctctggtctgggaactaatacgatggctacaggcagtggcgcaccaatggcagacaataacgagggcgccgacggagtgggtaattcctcgggaaattggcattgcgattccacatggatgggcgacagagtcatcaccaccagcacccgaacctgggccctgcccacctacaacaaccacctctacaaacaaatttccagccaatcaggagcctcgaacggcaatcactactttggctacagcaccccttgggggtattttgacttcaacagattccactgccacttttcaccacgtgactggcaaagactcatcaacaacaactggggattccgacccaagagactcaacttcaagctctttaacattcaagtcaaagaggtcacgcagaatgacggtacgacgacgattgccaataaccttaccagcacggttcaggtgtttactgactcggagtaccagctcccgtacgtcctcggctcggcgcatcaaggatgcctcccgccgttcccagcagacgtcttcatggtgccacagtatggatacctcaccctgaacaacgggagtcaggcagtaggacgctcttcattttactgcctggagtactttccttctcagatgctgcgtaccggaaacaactttaccttcagctacacttttgaggacgttcctttccacagcagctacgctcacagccagagtctggaccgtctcatgaatcctctcatcgaccagtacctgtattacttgagcagaacaaacactccaagtggaaccaccacgcagtcaaggcttcagttttctcaggccggagcgagtgacattcgggaccagtctaggaactggcttcctggaccctgttaccgccagcagcgagtatcaaagacatctgcggataacaacaacagtgaatactcgtggactggagctaccaagtaccacctcaatggcagagactctctggtgaatccgggcccggccatggcaagccacaaggacgatgaagaaaagttttttcctcagagcggggttctcatctttgggaagcaaggctcagagaaaacaaatgtggacattgaaaaggtcatgattacagacgaagaggaaatcaggacaaccaatcccgtggctacggagcagtatggttctgtatctaccaacctccagaggggcaacagacaagcagctaccgcagatgtcaacacacaaggcgttcttccaggcatggtctggcaggacagagatgtgtaccttcaggggcccatctgggcaaagattccacacacggacggacattttcacccctctcccctcatgggtggattcggacttaaacaccctcctccacagattctcatcaagaacaccccggtacctgcgaatccttcgaccaccttcagtgcggcaaagtttgcttccttcatcacacagtactccacgggacaggtcagcgtggagatcgagtgggagctgcagaaggaaaacagcaaacgctggaatcccgaaattcagtacacttccaactacaacaagtctgttaatgtggactttactgtggacactaatggcgtgtattcagagcctcgccccattggcaccagatacctgactcgtaatctgtaa

SEQ ID NO: 2044 - DNA, 2208 bp, Artificial Sequence
  Synthetic Polynucleotide
atggctgccgatggttatcttccagattggctcgaggacactctctctgaaggaataagacagtggtggaagctcaaacctggcccaccaccaccaaagcccgcagagcggcataaggacgacagcaggggtcttgtgcttcctgggtacaagtacctcggacccttcaacggactcgacaagggagagccggtcaacgaggcagacgccgcggccctcgagcacgacaaagcctacgaccggcagctcgacagcggagacaacccgtacctcaagtacaaccacgccgacgcggagtttcaggagcgccttaaagaagatacgtcttttgggggcaacctcggacgagcagtcttccaggcgaaaaagagggttcttgaacctctgggcctggttgaggaacctgttaagacggctccgggaaaaaagaggccggtagagcactctcctgtggagccagactcctcctcgggaaccggaaaggcgggccagcagcctgcaagaaaaagattgaattttggtcagactggagacgcagactcagtacctgacccccagcctctcggacagccaccagcagccccctctggtctgggaactaatacgatggctacaggcagtggcgcaccaatggcagacaataacgagggcgccgacggagtgggtaattcctcgggaaattggcattgcgattccacatggatgggcgacagagtcatcaccaccagcacccgaacctgggccctgcccacctacaacaaccacctctacaaacaaatttccagccaatcaggagcctcgaacgacaatcactactttggctacagcaccccttgggggtattttgacttcaacagattccactgccacttttcaccacgtgactggcaaagactcatcaacaacaactggggattccgacccaagagactcaacttcaagctctttaacattcaagtcaaagaggtcacgcagaatgacggtacgacgacgattgccaataaccttaccagcacggttcaggtgtttactgactcggagtaccagctcccgtacgtcctcggctcggcgcatcaaggatgcctcccgccgttcccagcagacgtcttcatggtgccacagtatggatacctcaccctgaacaacgggagtcgggcagtaggacgctcttcattttactgcctggagtactttccttctcagatgctgcgtaccggaaacaactttaccttcagctacacttttgaggacgttcctttccacagcagctacgctcacagccagagtctggaccgtctcatgaatcctctcatcgaccagtacctgtattacttgagcagaacaaacactccaagtggaaccaccacgcagtcaaggcttcagttttctcaggccggagcgagtgacattcgggaccagtctaggaactggcttcctggaccctgttaccgccagcagcgagtatcaaaggcatctgcggataacaacaacagtgaatactcgtggactggagctaccaagtaccacctcaatggcagagactctctggtgaatccgggcccggccatggcaagccacaaggacgatgaagaaaagttttttcctcagagcggggttctcatctttgggaagcaaggctcagagaaaacaaatgtggacattgaaaaggtcatgattacagacgaagaggaaatcaggacaaccaatcccgtggctacggagcagtatggttctgtatctaccaacctccagagaggcaacagacaagcagctaccgcagatgtcaacacacaaggcgttcttccaggcatggtctggcaggacagagatgtgtaccttcaggggcccatctgggcaaagattccacacacggacggacattttcacccctctcccctcatgggtggattcggacttaaacaccctcctccacagattctcatcaagaacaccccggtacctgcgaatccttcgaccaccttcagtgcggcaaagtttgcttccttcatcacacagtactccacgggacaggtcagcgtggagatcgagtgggagctgcagaaggaaaacagcaaacgctggaatcccgaaattcagtacacttccaactacaacaagtctgttaatgtggactttactgtggacactaatggcgtgtattcagagcctcgccccattggcaccagatacctgactcgtaatctgtaa

SEQ ID NO: 2045 - DNA, 2208 bp, Artificial Sequence
  Synthetic Polynucleotide
atggctgccgatggttatcttccagattggctcgaggacactctctctgaaggaataagacagtggtggaagctcaaacctggcccaccaccaccaaagcccgcagagcggcatagggacgacagcaggggtcttgtgcttcctgggtacaagtacctcggacccttcaacggactcgacaagggagagccggtcaacgaggcagacgccgcggccctcgagcacgacaaagcctacgaccggcagctcgacagcggagacaacccgtacctcaagtacaaccacgccgacgcggagtttcaggagcgccttaaagaagatacgtcttttgggggcaacctcggacgagcagtcttccaggcgaaaaagagggttcttgaacctctgggcctggttgaggaacctgttaagacggctccgggaaaaaagaggccggtagagcactctcctgtggagccagactcctcctcgggaaccggaaaggcgggccagcagcctgcaagaaaaagattgaattttggtcagactggagacgcagactcagtacctgacccccagcctctcggacagccaccagcagccccctctggtctgggaactaatacgatggctacaggcagtggcgcaccaatggcagacaataacgagggcgccgacggagtgggtaattcctcgggaaattggcattgcgattccacatggatgggcgacagagtcatcaccaccagcacccgaacctgggccctgcccacctacaacaaccacctctacaaacaaatttccagccaatcaggagcctcgaacggcaatcactactttggctacagcaccccttgggggtattttgacttcaacagattccactgccacttttcaccacgtgactggcaaagactcatcaacaacaactggggattccgacccaagagactcaacttcaagctctttaacattcaagtcaaagaggtcacgcagaatgacggtacgacgacgattgccaataaccttaccagcacggttcaggtgtttactgactcggagtaccagctcccgtacgtcctcggctcggcgcatcaaggatgcctcccgccgttcccagcagacgtcttcatggtgccacagtatggatacctcaccctgaacaacgggagtcaggcagtaggacgctcttcattttactgcctggagtactttccttctcagatgctgcgtaccggaaacaactttaccttcagctacacttttgaggacgttcctttccacagcagctacgctcacagccagagtctggaccgtctcatgaatcctctcatcgaccagtacctgtattacttgagcagaacaaacactccaagtggaaccaccacgcagtcaaggcttcagttttctcaggccggagcgagtggcattcgggaccagtctaggaactggcttcctggaccctgttaccgccagcagcgagtatcaaagacatctgcggataacaacaacagtgaatactcgtggactggagctaccaagtaccacctcaatggcagagactctctggtgaatccgggcccggccatggcaagccacaaggacgatgaagaaaagttttttcctcagagcggggttctcatctttgggaagcaaggctcagagaaaacaaatgtggacattgaaaaggtcatgattacagacgaagaggaaatcaggacaaccaatcccgtggctacggagcagtatggttctgtatctaccaacctccagaggggcaacagacaagcagctaccgcagatgtcaacacacaaggcgttcttccaggcatggtctggcaggacagagatgtgtaccttcaggggcccatctgggcaaagattccacacacggacggacattttcacccctctcccctcatgggtggattcggacttaaacaccctcctccacagattctcatcaagaacaccccggtacctgcgaatccttcgaccaccttcagtgcggcaaagtttgcttccttcatcacacagtactccacgggacaggtcagcgtggagatcgagtgggagctgcagaaggaaaacagcaaacgctggaatcccgaaattcagtacacttccaactacaacaagtctgttaatgtggactttactgtggacactaatggcgtgtattcagagcctcgccccattggcaccagatacctgactcgtaatctgtaa

SEQ ID NO: 2046 - DNA, 2208 bp, Artificial Sequence
  Synthetic Polynucleotide
atggctgccgatggttatcttccagattggctcgaggacactctctctgaaggaataagacagtggtggaagctcaaacctggcccaccaccaccaaagcccgcagagcggcatagggacgacagcaggggtcttgtgcttcctgggtacaagtacctcggacccttcaacggactcgacaagggagagccggtcaacgaggcagacgccgcggccctcgagcacgacaaagcctacgaccggcagctcgacagcggagacaacccgtacctcaagtacaaccacgccgacgcggagtttcaggagcgccttaaagaagatacgtcttttgggggcaacctcggacgagcagtcttccaggcgaaaaagagggttcttgaacctctgggcctggttgaggaacctgttaagacggctccgggaaaaaagaggccggtagagcactctcctgtggagccagactcctcctcgggaaccggaaaggcgggccagcagcctgcaagaaaaagattgaattttggtcagactggagacgcagactcagtacctgacccccagcctctcggacagccaccagcagccccctctggtctgggaactaatacgatggctacaggcagtggcgcaccaatggcagacaataacgagggcgccgacggagtgggtaattcctcgggaaattggcattgcgattccacatggatgggcgacagagtcatcaccaccagcacccgaacctgggccctgcccacctacaacaaccacctctacaaacaaatttccagccaatcaggagcctcgaacggcaatcactactttggctacagcaccccttgggggtattttgacttcaacagattccactgccacttttcaccacgtgactggcaaagactcatcaacaacaactggggattccgacccaagagactcaacttcaagctctttaacattcaagtcaaagaggtcacgcagaatgacggtacgacgacgattgccaataaccttaccagcacggttcaggtgtttactgactcggagtaccagctcccgtacgtcctcggctcggcgcatcaaggatgcctcccgccgttcccagcagacgtcttcatggtgccacagtatggatacctcaccctgaacaacgggagtcaggcagtaggacgctcttcattttactgcctggagtactttccttctcagatgctgcgtaccggaaacaactttaccttcagctacacttttgaggacgttcctttccacagcaactacgctcacagccagagtctggaccgtctcatgaatcctctcatcgaccagtacctgtattacttgagcagaacaaacactccaagtggaaccaccacgcagtcaaggcttcagttttctcaggccggagcgagtgacattcgggaccagtctaggaactggcttcctggaccctgttaccgccagcagcgagtatcaaagacatctgcggataacaacaacagtgaatactcgtggactggagctaccaagtaccacctcaatggcagagactctctggtgaatccgggcccggccatggcaagccacaaggacgatgaagaaaagttttttcctcagagcggggttctcatctttgggaagcaaggctcagagaaaacaaatgtggacattgaaaaggtcatgattacagacgaagaggaaatcaggacaaccaatcccgtggctacggagcagtatggttctgtatctaccaacctccagaggggcaacagacaagcagctaccgcagatgtcaacacacaaggcgttcttccaggcatggtctggcaggacagagatgtgtaccttcaggggcccatctgggcaaagattccacacacggacggacattttcacccctctcccctcatgggtggattcggacttaaacaccctcctccacagattctcatcaagaacaccccggtacctgcgaatccttcgaccaccttcagtgcggcaaagtttgcttccttcatcacacagtactccacgggacaggtcagcgtggagatcgagtgggagctgcagaaggaaaacagcaaacgctggaatcccgaaattcagtacacttccaactacaacaagtctgttaatgtggactttactgtggacactaatggcgtgtattcagagcctcgccccattggcaccagatacctgactcgtaatctgtaa

SEQ ID NO: 2047 - DNA, 2208 bp, Artificial Sequence
  Synthetic Polynucleotide
atggctgccgatggttatcttccagattggctcgaggacactctctctgaaggaataagacagtggtggaagctcaaacctggcccaccaccaccaaagcccgcagagcggcataaggacgacagcaggggtcttgtgcttcctgggtacaagtacctcggacccttcaacggactcgacaagggagagccggtcaacgaggcagacgccgcggccctcgagcacgacaaagcctacgaccggcagctcgacagcggagacaacccgtacctcaagtacaaccacgccgacgcggagtttcaggagcgccttaaagaagatacgtcttttgggggcaacctcggacgagcagtcttccaggcgaaaaagagggttcttgaacctctgggcctggttgaggaacctgttaagacggctccgggaaaaaagaggccggtagagcactctcctgtggagccagactcctcctcgggaaccggaaaggcgggccagcagcctgcaagaaaaagattgaattttggtcagactggagacgcagactcagtacctgacccccagcctctcggacagccaccagcagccccctctggtctgggaactaatacgatggctacaggcagtggcgcaccaatggcagacaataacgagggcgccgacggagtgggtaattcctcgggaaattggcattgcgattccacatggatgggcgacagagtcatcaccaccagcacccgaacctgggccctgcccacctacaacaaccacctctacaaacaaatttccagccaatcaggagcctcgaacgacaatcactactttggctacagcaccccttgggggtattttgacttcaacagattccactgccacttttcaccacgtgactggcaaagactcatcaacaacaactggggattccgacccaagagactcaacttcaagctctttaacattcaagtcaaagaggtcacgcagaatgacggtacgacgacgattgccaataaccttaccagcacggttcaggtgtttactgactcggagtaccagctcccgtacgtcctcggctcggcgcatcaaggatgcctcccgccgttcccagcagacgtcttcatggtgccacagtatggatacctcaccctgaacaacgggagtcaggcagtaggacgctcttcattttactgcctggagtactttccttctcagatgctgcgtaccggaaacaactttaccttcagctacacttttgaggacgttcctttccacagcagctacgctcacagccagagtctggaccgtctcatgaatcctctcatcgaccagtacctgtattacttgagcagaacaaacactccaagtggaaccaccacgcagtcaaggcttcagttttctcaggccggagcgagtgacattcgggaccagtctaggaactggcttcctggaccctgttaccgccagcagcgagtatcaaagacatctgcggataacaacaacagtgaatactcgtggactggagctaccaagtaccacctcaatggcagagactctctggtgaatccgggcccggccatggcaagccacaaggacgatgaagaaaagttttttcctcagagcggggttctcatctttgggaagcaaggctcagagaaaacaaatgtggacattgaaaaggtcatgattacagacgaagaggaaatcaggacaaccaatcccgtggctacggagcagtatggttctgtatctaccaacctccagagaggcaacagacaagcagctaccgcagatgtcaacacacaaggcgttcttccaggcatggtctggcaggacagagatgtgtaccttcaggggcccatctgggcaaagattccacacacggacggacattttcacccctctcccctcatgggtggattcggacttaaacaccctcctccacagattctcatcaagaacaccccggtacctgcgaatccttcgaccaccttcagtgcggcaaagtttgcttccttcatcacacagtactccgcgggacaggtcagcgtggagatcgagtgggagctgcagaaggaaaacagcaaacgctggaatcccgaaattcagtacacttccaactacaacaagtctgttaatgtggactttactgtggacactaatggcgtgtattcagagcctcgccccattggcaccagatacctgactcgtaatctgtaa

SEQ ID NO: 2048 - DNA, 2208 bp, Artificial Sequence
  Synthetic Polynucleotide
atggctgccgatggttatcttccagattggctcgaggacactctctctgaaggaataagacagtggtggaagctcaaacctggcccaccaccaccaaagcccgcagagcggcataaggacgacagcaggggtcttgtgcttcctgggtacaagtacctcggacccttcaacggactcgacaagggagagccggtcaacgaggcagacgccgcggccctcgagcacgacaaagcctacgaccggcagctcgacagcggagacaacccgtacctcaagtacaaccacgccgacgcggagtttcaggagcgccttaaagaagatacgtcttttgggggcaacctcggacgagcagtcttccaggcgaaaaagagggttcttgaacctctgggcctggttgaggaacctgttaagacggctccgggaaaaaagaggccggtagagcactctcctgtggagccagactcctcctcgggaaccggaaaggcgggccagcagcctgcaagaaaaagattgaattttggtcagactggagacgcagactcagtacctgacccccagcctctcggacagccaccagcagccccctctggtctgggaactaatacgatggctacaggcagtggcgcaccaatggcagacaataacgagggcgccgacggagtgggtaattcctcgggaaattggcattgcgattccacatggatgggcgacagagtcatcaccaccagcacccgaacctgggccctgcccacctacaacaaccacctctacaaacaaatttccagccaatcaggagcctcgaacgacaatcactactttggctacagcaccccttgggggtattttgacttcaacagattccactgccacttttcaccacgtgactggcaaagactcatcaacaacaactggggattccgacccaagagactcaacttcaagctctttaacattcaagtcaaagaggtcacgcagaatgacggtacgacgacgattgccaataaccttaccagcacggttcaggtgtttactgactcggagtaccagctcccgtacgtcctcggctcggcgcatcaaggatgcctcccgccgttcccagcagacgtcttcatggtgccacagtatggatacctcaccctgaacaacgggagtcaggcagtaggacgctcttcattttactgcctggagtactttccttctcagatgctgcgtaccggaaacaactttaccttcagctacacttttgaggacgttcctttccacagcagctacgctcacagccagagtctggaccgtctcatgaatcctctcatcgaccagtacctgtattacttgagcagaacaaacactccaagtggaaccaccacgcagtcaaggcttcagttttctcaggccggagcgagtgacattcgggaccagtctaggaactggcttcctggaccctgttaccgccagcagcgagtatcaaagacatctgcggataacaacaacagtgaatactcgtggactggagctaccaagtaccacctcaatggcagagactctctggtgaatccgggcccggccatggcaagccacaaggacgatgaagaaaagttttttcctcagagcggggttctcatctttgggaagcaaggctcagagaaaacaaatgtggacattgaaaaggtcatgattacagacgaagaggaaatcaggacaaccaatcccgtggctacggagcagtatggttctgtatctaccaacctccagagaggcaacagacaagcagctaccgcagatgtcaacacacaaggcgttcttccaggcatggtctggcaggacagagatgtgtaccttcaggggcccatctgggcaaagattccacacacggacggacattttcacccctctcccctcatgggtggattcggacttaaacaccctcctccacagattctcatcaagaacaccccggtacctgcgaatccttcgaccaccttcagtgcggcaaagtttgcttccttcatcacacagtactccacgggacaggtcagcgtggagatcgagtgggagctgcagaaggaaaacagcaaacgctggaatcccgaaattcagtacacttccaactacaacaagtctgttaatgtggactttactgtggacactgatggcgtgtattcagagcctcgccccattggcaccagatacctgactcgtaatctgtaa

SEQ ID NO: 2049 - DNA, 2208 bp, Artificial Sequence
  Synthetic Polynucleotide
atggctgccgatggttatcttccagattggctcgaggacactctctctgaaggaataagacagtggtggaagctcaaacctggcccaccaccaccaaagcccgcagagcggcataaggacgacagcaggggtcttgtgcttcctgggtacaagtacctcggacccttcaacggactcgacaagggagagccggtcaacgaggcagacgccgcggccctcgagcacgacaaagcctacgaccggcagctcgacagcggagacaacccgtacctcaagtacaaccacgccgacgcggagtttcaggagcgccttaaagaagatacgtcttttgggggcaacctcggacgagcagtcttccaggcgaaaaagagggttcttgaacctctgggcctggttgaggaacctgttaagacggctccgggaaaaaagaggccggtagagcactctcctgtggagccagactcctcctcgggaaccggaaaggcgggccagcagcctgcaagaaaaagattgaattttggtcagactggagacgcagactcagtacctgacccccagcctctcggacagccaccagcagccccctctggtctgggaactaatacgatggctacaggcagtggcgcaccaatggcagacaataacgagggcgccgacggagtgggtaattcctcgggaaattggcattgcgattccacatggatgggcgacagagtcatcaccaccagcacccgaacctgggccctgcccacctacaacaaccacctctacaaacaaatttccagccaatcaggagcctcgaacgacaatcactactttggctacagcaccccttgggggtattttgacttcaacagattccactgccacttttcaccacgtgactggcaaagactcatcaacaacaactggggattccgacccaagagactcaacttcaagctctttaacattcaagtcaaagaggtcacgcagaatgacggtacgacgacgattgccaataaccttaccagcacggttcaggtgtttactgactcggagtaccagctcccgtacgtcctcggctcggcgcatcaaggatgcctcccgccgttcccagcagacgtcttcatggtgccacagtatggatacctcaccctgaacaacgggagtcaggcagtaggacgctcttcattttactgcctggagtactttccttctcagatgctgcgtaccggaaacaactttaccttcagctacacttttgaggacgttcctttccacagcagctacgctcacagccagagtctggaccgtctcatgaatcctctcatcgaccagtacctgtattacttgagcagaacaaacactccaagtggaaccaccacgcagtcaaggcttcagttttctcaggccggagcgagtgacattcgggaccagtctaggaactggcttcctggaccctgttaccgccagcagcgagtatcaaagacatctgcggataacaacaacagtgaatactcgtggactggagctaccaagtaccacctcaatggcagagactctctggtgaatccgggcccggccatggcaagccacaaggacgatgaagaaaagttttttcctcagagcggggttctcatctttgggaagcaaggctcagagaaaacaaatgtggacattgaaaaggtcatgattacagacgaagaggaaatcaggacaaccaatcccgtggctacggagcagtatggttctgtatctaccaacctccagagaggcaacagacaagcagctaccgcagatgtcaacacacaaggcgttcttccaggcatggtctggcagggcagagatgtgtaccttcaggggcccatctgggcaaagattccacacacggacggacattttcacccctctcccctcatgggtggattcggacttaaacaccctcctccacagattctcatcaagaacaccccggtacctgcgaatccttcgaccaccttcagtgcggcaaagtttgcttccttcatcacacagtactccacgggacaggtcagcgtggagatcgagtgggagctgcagaaggaaaacagcaaacgctggaatcccgaaattcagtacacttccaactacaacaagtctgttaatgtggactttactgtggacactaatggcgtgtattcagagcctcgccccattggcaccagatacctgactcgtaatctgtaa

SEQ ID NO: 2050 - DNA, 2208 bp, Artificial Sequence
  Synthetic Polynucleotide
atggctgccgatggttatcttccagattggctcgaggacactctctctgaaggaataagacagtggtggaagctcaaacctggcccaccaccaccaaagcccgcagagcggcataaggacgacagcaggggtcttgtgcttcctgggtacaagtacctcggacccttcaacggactcgacaagggagagccggtcaacgaggcagacgccgcggccctcgagcacgacaaagcctacgaccggcagctcgacagcggagacaacccgtacctcaagtacaaccacgccgacgcggagtttcaggagcgccttaaagaagatacgtcttttgggggcaacctcggacgagcagtcttccaggcgaaaaagagggttcttgaacctctgggcctggttgaggaacctgttaagacggctccgggaaaaaaggggccggtagagcactctcctgtggagccagactcctcctcgggaaccggaaaggcgggccagcagcctgcaagaaaaagattgaattttggtcagactggagacgcagactcagtacctgacccccagcctctcggacagccaccagcagccccctctggtctgggaactaatacgatggctacaggcagtggcgcaccaatggcagacaataacgagggcgccgacggagtgggtaattcctcgggaaattggcattgcgattccacatggatgggcgacagagtcatcaccaccagcacccgaacctgggccctgcccacctacaacaaccacctctacaaacaaatttccagccaatcaggagcctcgaacgacaatcactactttggctacagcaccccttgggggtattttgacttcaacagattccactgccacttttcaccacgtgactggcaaagactcatcaacaacaactggggattccgacccaagagactcaacttcaagctctttaacattcaagtcaaagaggtcacgcagaatgacggtacgacgacgattgccaataaccttaccagcacggttcaggtgtttactgactcggagtaccagctcccgtacgtcctcggctcggcgcatcaaggatgcctcccgccgttcccagcagacgtcttcatggtgccacagtatggatacctcaccctgaacaacgggagtcaggcagtaggacgctcttcattttactgcctggagtactttccttctcagatgctgcgtaccggaaacaactttaccttcagctacacttttgaggacgttcctttccacagcagctacgctcacagccagagtctggaccgtctcatgaatcctctcatcgaccagtacctgtattacttgagcagaacaaacactccaagtggaaccaccacgcagtcaaggcttcagttttctcaggccggagcgagtgacattcgggaccagtctaggaactggcttcctggaccctgttaccgccagcagcgagtatcaaagacatctgcggataacaacaacagtgaatactcgtggactggagctaccaagtaccacctcaatggcagagactctctggtgaatccgggcccggccatggcaggccacaaggacgatgaagaaaagttttttcctcagagcggggttctcatctttgggaagcaaggctcagagaaaacaaatgtggacattgaaaaggtcatgattacagacgaagaggaaatcaggacaaccaatcccgtggctacggagcagtatggttctgtatctaccaacctccagagaggcaacagacaagcagctaccgcagatgtcaacacacaaggcgttcttccaggcatggtctggcaggacagagatgtgtaccttcaggggcccatctgggcaaagattccacacacggacggacattttcacccctctcccctcatgggtggattcggacttaaacaccctcctccacagattctcatcaagaacaccccggtacctgcgaatccttcgaccaccttcagtgcggcaaagtttgcttccttcatcacacagtactccacgggacaggtcagcgtggagatcgagtgggagctgcagaaggaaaacagcaaacgctggaatcccgaaattcagtacacttccaactacaacaagtctgttaatgtggactttactgtggacactaatggcgtgtattcagagcctcgccccattggcaccagatacctgactcgtaatctgtaa

SEQ ID NO: 2051 - DNA, 2208 bp, Artificial Sequence
  Synthetic Polynucleotide
atggctgccgatggttatcttccagattggctcgaggacactctctctgaaggaataagacagtggtggaagctcaaacctggcccaccaccaccaaagcccgcagagcggcataaggacgacagcaggggtcttgtgcttcctgggtacaagtacctcggacccttcaacggactcgacaagggagagccggtcaacgaggcagacgccgcggccctcgagcacgacaaagcctacgaccggcagctcgacagcggagacaacccgtacctcaagtacaaccacgccgacgcggagtttcaggagcgccttaaagaagatacgtcttttgggggcaacctcggacgagcagtcttccaggcgaaaaagagggttcttgaacctctgggcctggttgaggaacctgttaagacggctccgggaaaaaagaggctggtagagcactctcctgtggagccagactcctcctcgggaaccggaaaggcgggccagcagcctgcaagaaaaagattgaattttggtcagactggagacgcagactcagtacctgacccccagcctctcggacagccaccagcagccccctctggtctgggaactaatacgatggctacaggcagtggcgcaccaatggcagacaataacgagggcgccgacggagtgggtaattcctcgggaaattggcattgcgattccacatggatgggcgacagagtcatcaccaccagcacccgaacctgggccctgcccacctacaacaaccacctctacaaacaaatttccagccaatcaggagcctcgaacgacaatcactactttggctacagcaccccttgggggtattttgacttcaacagattccactgccacttttcaccacgtgactggcaaagactcatcaacaacaactggggattccgacccaagagactcaacttcaagctctttaacattcaagtcaaagaggtcacgcagaatgacggtacgacgacgattgccaataaccttaccagcacggttcaggtgtttactgactcggagtaccagctcccgtacgtcctcggctcggcgcatcaaggatgcctcccgccgttcccagcagacgtcttcatggtgccacagtatggatacctcaccctgaacaacgggagtcaggcagtaggacgctcttcattttactgcctggagtactttccttctcagatgctgcgtaccggaaacaactttaccttcagctacacttttgaggacgttcctttccacagcagctacgctcacagccagagtctggaccgtctcatgaatcctctcatcgaccagtacctgtattacttgagcagaacaaacactccaagtggaaccaccacgcagtcaaggcttcagttttctcaggccggagcgagtgacattcgggaccagtctaggaactggcttcctggaccctgttaccgccagcagcgagtatcaaagacatctgcggataacaacaacagtgaatactcgtggactggagctaccaagtaccacctcaatggcagagactctctggtgaatccgggcccggccatggcaagccacaaggacgatgaagaaaagttttttcctcagagcggggttctcatctttgggaagcaaggctcagagaaaacaaatgtggacattgaaaaggtcatgattacagacgaagaggaaatcaggacaaccaatcccgtggctacggagcagtatggttctgtatctaccaacctccagagaggcaacagacaagcagctaccgcagatgtcaacacacaaggcgttcttccaggcatggtctggcaggacagagatgtgtaccttcaggggcccatctgggcaaagattccacacacggacggacattttcacccctctcccctcatgggtggattcggacttaaacaccctcctccacagattctcatcaagaacaccccggtacctgcgaatccttcgaccaccttcagtgcggcaaagtttgcttccttcatcacacagtactccacgggacaggtcagcgtggagatcgagtgggagctgcagaaggaaaacagcaaacgctggaatcccgaaattcagtacacttccaactacaacaagtctgttaatgtggactttactgtggacactaatggcgtgtattcagagcctcgccccattggcaccagatacctgactcgtaatctgtaa

SEQ ID NO: 2052 - DNA, 2208 bp, Artificial Sequence
  Synthetic Polynucleotide
atggctgccgatggttatcttccagattggctcgaggacactctctctgaaggaataagacagtggtggaagctcaaacctggcccaccaccaccaaagcccgcagagcggcataaggacgacagcaggggtcttgtgcttcctgggtacaagtacctcggacccttcaacggactcgacaagggagagccggtcaacgaggcaggcgccgcggccctcaagcacgacaaagcctacgaccggcagctcgacagcggagacaacccgtacctcaagtacaaccacgccgacgcggagtttcaggagcgccttaaagaagatacgtcttttgggggcaacctcggacgagcagtcttccaggcgaaaaagagggttcttgaacctctgggcctggttgaggaacctgttaagacggctccgggaaaaaagaggccggtagagcactctcctgtggagccagactcctcctcgggaaccggaaaggcgggccagcagcctgcaagaaaaagattgaattttggtcagactggagacgcagactcagtacctgacccccagcctctcggacagccaccagcagccccctctggtctgggaactaatacgatggctacaggcagtggcgcaccaatggcagacaataacgagggcgccgacggagtgggtaattcctcgggaaattggcattgcgattccacatggatgggcgacagagtcatcaccaccagcacccgaacctgggccctgcccacctacaacaaccacctctacaaacaaatttccagccaatcaggagcctcgaacgacaatcactactttggctacagcaccccttgggggtattttgacttcaacagattccactgccacttttcaccacgtgactggcaaagactcatcaacaacaactggggattccgacccaagagactcaacttcaagctctttaacattcaagtcaaagaggtcacgcagaatgacggtacgacgacgattgccaataaccttaccagcacggttcaggtgtttactgactcggagtaccagctcccgtacgtcctcggctcggcgcatcaaggatgcctcccgccgttcccagcagacgtcttcatggtgccacagtatggatacctcaccctgaacaacgggagtcaggcagtaggacgctcttcattttactgcctggagtactttccttctcagatgctgcgtaccggaaacaactttaccttcagctacacttttgaggacgttcctttccacagcagctacgctcacagccagagtctggaccgtctcatgaatcctctcatcgaccagtacctgtattacttgagcagaacaaacactccaagtggaaccaccacgcagtcaaggcttcagttttctcaggccggagcgagtgacattcgggaccagtctaggaactggcttcctggaccctgttaccgccagcagcgagtatcaaagacatctgcggataacaacaacagtgaatactcgtggactggagctaccaagtaccacctcaatggcagagactctctggtgaatccgggcccggccatggcaagccacaaggacgatgaagaaaagttttttcctcagagcggggttctcatctttgggaagcaaggctcagagaaaacaaatgtggacattgaaaaggtcatgattacagacgaagaggaaatcaggacaaccaatcccgtggctacggagcagtatggttctgtatctaccaacctccagagaggcaacagacaagcagctaccgcagatgtcaacacacaaggcgttcttccaggcatggtctggcaggacagagatgtgtaccttcaggggcccatctgggcaaagattccacacacggacggacattttcacccctctcccctcatgggtggattcggacttaaacaccctcctccacagattctcatcaagaacaccccggtacctgcgaatccttcgaccaccttcagtgcggcaaagtttgcttccttcatcacacagtactccacgggacaggtcagcgtggagatcgagtgggagctgcagaaggaaaacagcaaacgctggaatcccgaaattcagtacacttccaactacaacaagtctgttaatgtggactttactgtggacactaatggcgtgtattcagagcctcgccccattggcaccagatacctgactcgtaatctgtaa

SEQ ID NO: 2053 - DNA, 2208 bp, Artificial Sequence
  Synthetic Polynucleotide
atggctgccgatggttatcttccagattggctcgaggacactctctctgaaggaataagacagtggtggaagctcaaacctggcccaccaccaccaaagcccgcagagcggcataaggacgacagcaggggtcttgtgcttcctgggtacaagtacctcggacccttcaacggactcgacaagggagagccggtcaacgaggcagacgccgcggccctcgagcacgacaaagcctacgaccggcagctcgacagcggagacaacccgtacctcaagtacaaccacgccgacgcggagtttcaggagcgccttaaagaagatacgtcttttgggggcaacctcggacgagcagtcttccaggcgaaaaagagggttcttgaacctctgggcctggttgaggaacctgttaagacggctccgggaaaaaagaggccggtagagcactctcctgtggagccagactcctcctcgggaaccggaaaggcgggccagcagcctgcaagaaaaagattgaattttggtcagactggagacgcagactcagtacctgacccccagcctctcggacagccaccagcagccccctctggtctgggaactaatacgatggctacaggcagtggcgcaccaatggcagacaataacgagggcgccgacggagtgggtaattcctcgggaaattggcattgcgattccacatggatgggcgacagagtcatcaccaccagcacccgaacctgggccctgcccacctacaacaaccacctctacaaacaaatttccagccaatcaggagcctcgaacgacaatcactactttggctacagcaccccttgggggtattttgacttcaacagattccactgccacttttcaccacgtgactggcaaagactcatcaacaacaactggggattccgacccaagagactcaacttcaagctctttaacattcaagtcaaagaggtcacgcagaatgacggtacgacgacgattgccaataaccttaccagcacggttcaggtgtttactgactcggagtaccagctcccgtacgtcctcggctcggcgcatcaaggatgcctcccgccgttcccagcagacgtcttcatggtgccacagtatggatacctcaccctgaacaacgggagtcaggcagtaggacgctcttcattttactgcctggagtactttccttctcagatgctgcgtaccggaaacaactttaccttcagctacacttttgaggacgttcctttccacagcagctacgctcacagccagagtctggaccgtctcatgaatcctctcatcgaccagtacctgtattacttgagcagaacaaacactccaagtggaaccaccacgcagtcaaggcttcagttttctcaggccggagcgagtggcattcgggaccagtctaggaactggcttcctggaccctgttaccgccagcagcgagtatcaaagacatctgcggataacaacaacagtgaatactcgtggactggagctaccaagtaccacctcaatggcagagactctctggtgaatccgggcccggccatggcaagccacaaggacgatgaagaaaagttttttcctcagagcggggttctcatctttgggaagcaaggctcagagaaaacaaatgtggacattgaaaaggtcatgattacagacgaagaggaaatcaggacaaccaatcccgtggctacggagcagtatggttctgtatctaccaacctccagagaggcaacagacaagcagctaccgcagatgtcaacacacaaggcgttcttccaggcatggtctggcaggacagagatgtgtaccttcaggggcccatctgggcaaagattccacacacggacggacattttcacccctctcccctcatgggtggattcggacttaaacaccctcctccacagattctcatcaagaacaccccggtacctgcgaatccttcgaccaccttcagtgcggcaaagtttgcttccttcatcacacagtactccacgggacaggtcagcgtggagatcgagtgggagctgcagaaggaaaacagcaaacgctggaatcccgaaattcagtacacttccaactacaacaagtctgttaatgtggactttactgtggacactaatggcgtgtattcagagcctcgccccattggcaccagatacctgactcgtaatctgtaa

SEQ ID NO: 2054 - DNA, 2208 bp, Artificial Sequence
  Synthetic Polynucleotide
atggctgccgatggttatcttccagattggctcgaggacactctctctgaaggaataagacagtggtggaagctcaaacctggcccaccaccaccaaagcccgcagagcggcataaggacgacagcaggggtcttgtgcttcctgggtacaagtacctcggacccttcaacggactcgacaagggagagccggtcaacgaggcagacgccgcggccctcgagcacgacaaagcctacgaccggcagctcgacagcggagacaacccgtacctcaagtacaaccacgccgacgcggagtttcaggagcgccttaaagaagatacgtcttttgggggcaacctcggacgagcagtcttccaggcgaaaaagagggttcttgaacctctgggcctggttgaggaacctgttaagacggctccgggaaaaaagaggccggtagagcactctcctgtggagccagactcctcctcgggaaccggaaaggcgggccagcagcctgcaagaaaaagattgaattttggtcagactggagacgcagactcagtacctgacccccagcctctcggacagccaccagcagccccctctggtctgggaactaatacgatggctacaggcagtggcgcaccaatggcagacaataacgagggcgccgacggagtgggtaattcctcgggaaattggcattgcgattccacatggatgggcgacagagtcatcaccaccagcacccgaacctgggccctgcccacctacaacaaccacctctacaaacaaatttccagccaatcaggagcctcgaacgacaatcactactttggctacagcaccccttgggggtattttgacttcaacagattccactgccacttttcaccacgtgactggcaaagactcatcaacaacaactggggattccgacccaagagactcaacttcaagctctttaacattcaagtcaaagaggtcacgcagaatgacggtacgacgacgattgccaataaccttaccagcacggttcaggtgtttactgactcggagtaccagctcccgtacgtcctcggctcggcgcatcaaggatgcctcccgccgttcccagcagacgtcttcatggtgccacagtatggatacctcaccctgaacaacgggagtcaggcagtaggacgctcttcattttactgcctggagtactttccttctcagatgctgcgtaccggaaacaactttaccttcagctacacttttgaggacgttcctttccacagcagctacgctcacagccagagtctggaccgtctcatgaatcctctcatcgaccagtacctgtattacttgagcagagcaaacactccaagtggaaccaccacgcagtcaaggcttcagttttctcaggccggagcgagtgacattcgggaccagtctaggaactggcttcctggaccctgttaccgccagcagcgagtatcaaagacatctgcggataacaacaacagtgaatactcgtggactggagctaccaagtaccacctcaatggcagagactctctggtgaatccgggcccggccatggcaagccacaaggacgatgaagaaaagttttttcctcagagcggggttctcatctttgggaagcaaggctcagagaaaacaaatgtggacattgaaaaggtcatgattacagacgaagaggaaatcaggacaaccaatcccgtggctacggagcagtatggttctgtatctaccaacctccagagaggcaacagacaagcagctaccgcagatgtcaacacacaaggcgttcttccaggcatggtctggcaggacagagatgtgtaccttcaggggcccatctgggcaaagattccacacacggacggacattttcacccctctcccctcatgggtggattcggacttaaacaccctcctccacagattctcatcaagaacaccccggtacctgcgaatccttcgaccaccttcagtgcggcaaagtttgcttccttcatcacacagtactccacgggacaggtcagcgtggagatcgagtgggagctgcagaaggaaaacagcaaacgctggaatcccgaaattcagtacacttccaactacaacaagtctgttaatgtggactttactgtggacactaatggcgtgtattcagagcctcgccccattggcaccagatacctgactcgtaatctgtaa

SEQ ID NO: 2055 - DNA, 2208 bp, Artificial Sequence
  Synthetic Polynucleotide
atggctgccgatggttatcttccagattggctcgaggacactctctctgaaggaataagacagtggtggaagctcaaacctggcccaccaccaccaaagcccgcagagcggcataaggacgacagcaggggtcttgtgcttcctgggtacaagtacctcggacccttcaacggactcgacaagggagagccggtcaacgaggcagacgccgcggccctcgagcacgacaaagcctacgaccggcagctcgacagcggagacaacccgtacctcaagtacaaccacgccgacgcggagtttcaggagcgccttaaagaagatacgtcttttgggggcaacctcggacgagcagtcttccaggcgaaaaagagggttcttgaacctctgggcctggttgaggaacctgttaagacggctccgggaaaaaagaggccggtagagcactctcctgtggagccagactcctcctcgggaaccggaaaggcgggccagcagcctgcaagaaaaagattgaattttggtcagactggagacgcagactcagtacctgacccccagcctctcggacagccaccagcagccccctctggtctgggaactaatacgatggctacaggcagtggcgcaccaatggcagacaataacgagggcgccgacggagtgggtaattcctcgggaaattggcattgcgattccacatggatgggcgacagagtcatcaccaccagcacccgaacccgggccctgcccacctacaacaaccacctctacaaacaaatttccagccaatcaggagcctcgaacgacaatcactactttggctacagcaccccttgggggtattttgacttcaacagattccactgccacttttcaccacgtgactggcaaagactcatcaacaacaactggggattccgacccaagagactcaacttcaagctctttaacattcaagtcaaagaggtcacgcagaatgacggtacgacgacgattgccaataaccttaccagcacggttcaggtgtttactgactcggagtaccagctcccgtacgtcctcggctcggcgcatcaaggatgcctcccgccgttcccagcagacgtcttcatggtgccacagtatggatacctcaccctgaacaacgggagtcaggcagtaggacgctcttcattttactgcctggagtactttccttctcagatgctgcgtaccggaaacaactttaccttcagctacacttttgaggacgttcctttccacagcagctacgctcacagccagagtctggaccgtctcatgaatcctctcatcgaccagtacctgtattacttgagcagaacaaacactccaagtggaaccaccacgcagtcaaggcttcagttttctcaggccggagcgagtgacattcgggaccagtctaggaactggcttcctggaccctgttaccgccagcagcgagtatcaaagacatctgcggataacaacaacagtgaatactcgtggactggagctaccaagtaccacctcaatggcagagactctctggtgaatccgggcccggccatggcaagccacaaggacgatgaagaaaagttttttcctcagagcggggttctcatctttgggaagcaaggctcagagaaaacaaatgtggacattgaaaaggtcatgattacagacgaagaggaaatcaggacaaccaatcccgtggctacggagcagtatggttctgtatctaccaacctccagagaggcaacagacaagcagctaccgcagatgtcaacacacaaggcgttcttccaggcatggtctggcaggacagagatgtgtaccttcaggggcccatctgggcaaagattccacacacggacggacattttcacccctctcccctcatgggtggattcggacttaaacaccctcctccacagattctcatcaagaacaccccggtacctgcgaatccttcgaccaccttcagtgcggcaaagtttgcttccttcatcacacagtactccacgggacaggtcagcgtggagatcgagtgggagctgcagaaggaaaacagcaaacgctggaatcccgaaattcagtacacttccaactacaacaagtctgttaatgtggactttactgtggacactaatggcgtgtattcagagcctcgccccattggcaccagatacctgactcgtaatctgtaa

SEQ ID NO: 2056 - DNA, 2208 bp, Artificial Sequence
  Synthetic Polynucleotide
atggctgccgatggttatcttccagattggctcgaggacactctctctgaaggaataagacagtggtggaagctcaaacctggcccaccaccaccaaagcccgcagagcggcataaggacgacagcaggggtcttgtgcttcctgggtacaagtacctcggacccttcaacggactcgacaagggagagccggtcaacgaggcagacgccgcggccctcgagcacgacaaagcctacgaccggcagctcgacagcggagacaacccgtacctcaagtacaaccacgccgacgcggagtttcaggagcgccttaaagaagatacgtcttttgggggcaacctcggacgagcagtcttccaggcgaaaaagagggttcttgaacctctgggcctggttgaggaacctgttaagacggctccgggaaaaaagaggccggtagagcactctcctgtggagccagactcctcctcgggaaccggaaaggcgggccagcagcctgcaagaaaaagattgaattttggtcagactggagacgcagactcagtacctgacccccagcctctcggacagccaccagcagccccctctggtctgggaactaatacgatggctacaggcagtggcgcaccaatggcagacaataacgagggcgccgacggagtgggtaattcctcgggaaattggcattgcgattccacatggatgggcgacagagtcatcaccaccagcacccgaacctgggccctgcccacctacaacagccacctctacaaacaaatttccagccaatcaggagcctcgaacgacaatcactactttggctacagcaccccttgggggtattttgacttcaacagattccactgccacttttcaccacgtgactggcaaagactcatcaacaacaactggggattccgacccaagagactcaacttcaagctctttaacattcaagtcaaagaggtcacgcagaatgacggtacgacgacgattgccaataaccttaccagcacggttcaggtgtttactgactcggagtaccagctcccgtacgtcctcggctcggcgcatcaaggatgcctcccgccgttcccagcagacgtcttcatggtgccacagtatggatacctcaccctgaacaacgggagtcaggcagtaggacgctcttcattttactgcctggagtactttccttctcagatgctgcgtaccggaaacaactttaccttcagctacacttttgaggacgttcctttccacagcagctacgctcacagccagagtctggaccgtctcatgaatcctctcatcgaccagtacctgtattacttgagcagaacaaacactccaagtggaaccaccacgcagtcaaggcttcagttttctcaggccggagcgagtgacattcgggaccagtctaggaactggcttcctggaccctgttaccgccagcagcgagtatcaaagacatctgcggataacaacaacagtgaatactcgtggactggagctaccaagtaccacctcaatggcagagactctctggtgaatccgggcccggccatggcaagccacaaggacgatgaagaaaagttttttcctcagagcggggttctcatctttgggaagcaaggctcagagaaaacaaatgtggacattgaaaaggtcatgattacagacgaagaggaaatcaggacaaccaatcccgtggctacggagcagtatggttctgtatctaccaacctccagagaggcaacagacaagcagctaccgcagatgtcaacacacaaggcgttcttccaggcatggtctggcaggacagagatgtgtaccttcaggggcccatctgggcaaagattccacacacggacggacattttcacccctctcccctcatgggtggattcggacttaaacaccctcctccacagattctcatcaagaacaccccggtacctgcgaatccttcgaccaccttcagtgcggcaaagtttgcttccttcatcacacagtactccacgggacaggtcagcgtggagatcgagtgggagctgcagaaggaaaacagcaaacgctggaatcccgaaattcagtacacttccaactacaacaagtctgttaatgtggactttactgtggacactaatggcgtgtattcagagcctcgccccattggcaccagatacctgactcgtaatctgtaa

SEQ ID NO: 2057 - DNA, 2208 bp, Artificial Sequence
  Synthetic Polynucleotide
atggctgccgatggttatcttccagattggctcgaggacactctctctgaaggaataagacagtggtggaagctcaaacctggcccaccaccaccaaagcccgcagagcggcataaggacgacagcaggggtcttgtgcttcctgggtacaagtacctcggacccttcaacggactcgacaagggagagccggtcaacgaggcagacgccgcggccctcgagcacgacaaagcctacgaccggcagctcgacagcggagacaacccgtacctcaagtacaaccacgccgacgcggagtttcaggagcgccttaaagaagatacgtcttttgggggcaacctcggacgagcagtcttccaggcgaaaaagagggttcttgaacctctgggcctggttgaggaacctgttaagacggctccgggaaaaaagaggccggtagagcactctcctgtggagccagactcctcctcgggaaccggaaaggcgggccagcagcctgcaagaaaaagattgaattttggtcagactggagacgcagactcagtacctgacccccagcctctcggacagccaccagcagccccctctggtctgggaactaatacgatggctacaggcagtggcgcaccaatggcagacaataacgagggcgccgacggagtgggtaattcctcgggaaattggcattgcgattccacatggatgggcgacagagtcatcaccaccagcacccgaacctgggccctgcccacctacaacaaccacctctacaaacaaatttccagccaatcaggagcctcgaacgacaatcactactttggctacagcaccccttgggggtattttgacttcaacagattccactgccacttttcaccacgtgactggcaaagactcatcaacaacaactggggattccgacccaagagactcaacttcaagctctttaacattcaagtcaaagaggtcacgcagaatgacggtacgacgacgattgccaataaccttaccagcacggttcaggtgtttactgactcggagtaccagctcccgtacgtcctcggctcggcgcatcaaggatgcctcccgccgttcccagcagacgtcttcatggtgccacagtatggatacctcaccctgaacaacgggagtcaggcagtaggacgctcttcattttactgcctggagtactttccttctcagatgctgcgtaccggaaacaactttaccttcagctacacttttgaggacgttcctttccacagcagctacgctcacagccagagtctggaccgtctcatgaatcctctcatcgaccagtacctgtattacttgagcagaacaaacactccaagtggaaccaccacgcagtcaaggcttcagttttctcaggccggagcgagtgacattcgggaccagtctaggaactggcttcctggaccctgttaccgccagcagcgagtatcaaagacatctgcggataacaacaacagtgaatactcgtggactggagctaccaagtaccacctcaatggcagagactctctggtgaatccgggcccggccatggcaagccacaaggacgatgaagaaaagttttttcctcagagcggggttctcatctttgggaagcaaggctcagagaaaacaaatgtggacattgaaaaggtcatgattacagacgaagaggaaatcaggacaaccaatcccgtggctacggagcagtatggttctgtatctaccaacctccagagaggcaacagacaagcagctaccgcagatgtcaacacacaaggcgttcttccaggcatggtctggcaggacagagatgtgtaccttcaggggcccatctgggcaaagattccacacacggacggacattttcacccctctcccctcatgggtggattcggacttaaacgccctcctccacagattctcatcaagaacaccccggtacctgcgaatccttcgaccaccttcagtgcggcaaagtttgcttccttcatcacacagtactccacgggacaggtcagcgtggagatcgagtgggagctgcagaaggaaaacagcaaacgctggaatcccgaaattcagtacacttccaactacaacaagtctgttaatgtggactttactgtggacactaatggcgtgtattcagagcctcgccccattggcaccagatacctgactcgtaatctgtaa

SEQ ID NO: 2058 - DNA, 2208 bp, Artificial Sequence
  Synthetic Polynucleotide
atggctgccgatggttatcttccagattggctcgaggacactctctctgaaggaataagacagtggtggaagctcaaacctggcccaccaccaccaaagcccgcagagcggcataaggacgacagcaggggtcttgtgcttcctgggtacaagtacctcggacccttcaacggactcgacaagggagagccggtcaacgaggcagacgccgcggccctcgagcacgacaaagcctacgaccggcagctcgacagcggagacaacccgtacctcaagtacaaccacgccgacgcggagtttcaggagcgccttaaagaagatacgtcttttgggggcaacctcggacgagcagtcttccaggcgaaaaagagggttcttgaacctctgggcctggttgaggaacctgttaagacggctccgggaaaaaagaggccggtagagcactctcctgtggagccagactcctcctcgggaaccggaaaggcgggccagcagcctgcaagaaaaagattgaattttggtcagactggagacgcagactcagtacctgacccccagcctctcggacagccaccagcagccccctctggtctgggaactaatacgatggctacaggcagtggcgcaccaatggcagacaataacgagggcgccgacggagtgggtaattcctcgggaaattggcattgcgattccacatggatgggcgacagagtcatcaccaccagcacccgaacctgggccctgcccacctacaacaaccacctctacaaacaaatttccagccaatcaggagcctcgaacgacaatcactactttggctacagcaccccttgggggtattttgacttcaacagattccactgccacttttcaccacgtgactggcaaagactcatcaacaacaactggggattccgacccaagagactcaacttcaagctctttaacattcaagtcaaagaggtcacgcagaatgacggtacgacgacgattgccaataaccttaccagcacggttcaggtgtttactgactcggagtaccggctcccgtacgtcctcggctcggcgcatcaaggatgcctcccgccgttcccagcagacgtcttcatggtgccacagtatggatacctcaccctgaacaacgggagtcaggcagtaggacgctcttcattttactgcctggagtactttccttctcagatgctgcgtaccggaaacaactttaccttcagctacacttttgaggacgttcctttccacagcagctacgctcacagccagagtctggaccgtctcatgaatcctctcatcgaccagtacctgtattacttgagcagaacaaacactccaagtggaaccaccacgcagtcaaggcttcagttttctcaggccggagcgagtgacattcgggaccagtctaggaactggcttcctggaccctgttaccgccagcagcgagtatcaaagacatctgcggataacaacaacagtgaatactcgtggactggagctaccaagtaccacctcaatggcagagactctctggtgaatccgggcccggccatggcaagccacaaggacgatgaagaaaagttttttcctcagagcggggttctcatctttgggaagcaaggctcagagaaaacaaatgtggacattgaaaaggtcatgattacagacgaagaggaaatcaggacaaccaatcccgtggctacggagcagtatggttctgtatctaccaacctccagagaggcaacagacaagcagctaccgcagatgtcaacacacaaggcgttcttccaggcatggtctggcaggacagagatgtgtaccttcaggggcccatctgggcaaagattccacacacggacggacattttcacccctctcccctcatgggtggattcggacttaaacaccctcctccacagattctcatcaagaacaccccggtacctgcgaatccttcgaccaccttcagtgcggcaaagtttgcttccttcatcacacagtactccacgggacaggtcagcgtggagatcgagtgggagctgcagaaggaaaacagcaaacgctggaatcccgaaattcagtacacttccaactacaacaagtctgttaatgtggactttactgtggacactaatggcgtgtattcagagcctcgccccattggcaccagatacctgactcgtaatctgtaa

SEQ ID NO: 2059 - DNA, 2208 bp, Artificial Sequence
  Synthetic Polynucleotide
atggctgccgatggttatcttccagattggctcgaggacactctctctgaaggaataagacagtggtggaagctcaaacctggcccaccaccaccaaagcccgcagagcggcataaggacgacagcaggggtcttgtgcttcctgggtacaagtacctcggacccttcaacggactcgacaagggagagccggtcaacgaggcagacgccgcggccctcgagcacgacaaagcctacgaccggcagctcgacagcggagacaacccgtacctcaagtacaaccacgccgacgcggagtttcaggagcgccttaaagaagatacgtcttttgggggcaacctcggacgagcagtcttccaggcgaaaaagagggttcttgaacctctgggcctggttgaggaacctgttaagacggctccgggaaaaaagaggccggtagagcactctcctgtggagccagactcctcctcgggaaccggaaaggcgggccagcagcctgcaagaaaaagattgaattttggtcagactggagacgcagactcagtacctgacccccagcctctcggacagccaccagcagccccctctggtctgggaactaatacgatggctacaggcagtggcgcaccaatggcagacaataacgagggcgccgacggagtgggtaattcctcgggaaattggcattgcgattccacatggatgggcgacagagtcatcaccaccagcacccgaacctgggccctgcccacctacaacaaccacctctacaaacaaatttccagccaatcaggagcctcgaacgacaatcactactttggctacagcaccccttgggggtattttgacttcaacagattccactgccacttttcaccacgtgactggcaaagactcatcaacaacaactggggattccgacccaagagactcaacttcaagctctttaacattcaagtcaaagaggtcacgcagaatgacggtacgacgacgattgccaataaccttaccagcacggttcgggtgtttactgactcggagtaccagctcccgtacgtcctcggctcggcgcatcaaggatgcctcccgccgttcccagcagacgtcttcatggtgccacagtatggatacctcaccctgaacaacgggagtcaggcagtaggacgctcttcattttactgcctggagtactttccttctcagatgctgcgtaccggaaacaactttaccttcagctacacttttgaggacgttcctttccacagcagctacgctcacagccagagtctggaccgtctcatgaatcctctcatcgaccagtacctgtattacttgagcagaacaaacactccaagtggaaccaccacgcagtcaaggcttcagttttctcaggccggagcgagtgacattcgggaccagtctaggaactggcttcctggaccctgttaccgccagcagcgagtatcaaagacatctgcggataacaacaacagtgaatactcgtggactggagctaccaagtaccacctcaatggcagagactctctggtgaatccgggcccggccatggcaagccacaaggacgatgaagaaaagttttttcctcagagcggggttctcatctttgggaagcaaggctcagagaaaacaaatgtggacattgaaaaggtcatgattacagacgaagaggaaatcaggacaaccaatcccgtggctacggagcagtatggttctgtatctaccaacctccagagaggcaacagacaagcagctaccgcagatgtcaacacacaaggcgttcttccaggcatggtctggcaggacagagatgtgtaccttcaggggcccatctgggcaaagattccacacacggacggacattttcacccctctcccctcatgggtggattcggacttaaacaccctcctccacagattctcatcaagaacaccccggtacctgcgaatccttcgaccaccttcagtgcggcaaagtttgcttccttcatcacacagtactccacgggacaggtcagcgtggagatcgagtgggagctgcagaaggaaaacagcaaacgctggaatcccgaaattcagtacacttccaactacaacaagtctgttaatgtggactttactgtggacactaatggcgtgtattcagagcctcgccccattggcaccagatacctgactcgtaatctgtaa

SEQ ID NO: 2060 - DNA, 2208 bp, Artificial Sequence
  Synthetic Polynucleotide
atggctgccgatggttatcttccagattggctcgaggacactctctctgaaggaataagacagtggtggaagctcaaacctggcccaccaccaccaaagcccgcagagcggcatagggacgacagcaggggtcttgtgcttcctgggtacaagtacctcggacccttcaacggactcgacaagggagagccggtcaacgaggcagacgccgcggccctcgagcacgacaaagcctacgaccggcagctcgacagcggagacaacccgtacctcaagtacaaccacgccgacgcggagtttcaggagcgccttaaagaagatacgtcttttgggggcaacctcggacgagcagtcttccaggcgaaaaagagggttcttgaacctctgggcctggttgaggaacctgttaagacggctccgggaaaaaagaggccggtagagcactctcctgtggagccagactcctcctcgggaaccggaaaggcgggccagcagcctgcaagaaaaagattgaattttggtcagactggagacgcagactcagtacctgacccccagcctctcggacagccaccagcagccctctctggtctgggaactaatacgatggctacaggcagtggcgcaccaatggcagacaataacgagggcgccgacggagtgggtaattcctcgggaaattggcattgcgattccacatggatgggcgacagagtcatcaccaccagcacccgaacctgggccctgcccacctacaacaaccacctctacaaacaaatttccagccaatcaggagcctcgaacggcaatcactactttggctacagcaccccttgggggtattttgacttcaacagattccactgccacttttcaccacgtgactggcaaagactcatcaacaacaactggggattccgacccaagagactcaacttcaagctctttaacattcaagtcaaagaggtcacgcagaatgacggtacgacgacgattgccaataaccttaccagcacggttcaggtgtttactgactcggagtaccagctcccgtacgtcctcggctcggcgcatcaaggatgcctcccgccgttcccagcagacgtcttcatggtgccacagtatggatacctcaccctgaacaacgggagtcaggcagtaggacgctcttcattttactgcctggagtactttccttctcagatgctgcgtaccggaaacaactttaccttcagctacacttttgaggacgttcctttccacagcagctacgctcacagccagagtctggaccgtctcatgaatcctctcatcgaccagtacctgtattacttgagcagaacaaacactccaagtggaaccaccacgcagtcaaggcttcagttttctcaggccggagcgagtgacattcgggaccagtctaggaactggcttcctggaccctgttaccgccagcagcgagtatcaaagacatctgcggataacaacaacagtgaatactcgtggactggagctaccaagtaccacctcaatggcagagactctctggtgaatccgggcccggccatggcaagccacaaggacgatgaagaaaagttttttcctcagagcggggttctcatctttgggaagcaaggctcagagaaaacaaatgtggacattgaaaaggtcatgattacagacgaagaggaaatcaggacaaccaatcccgtggctacggagcagtatggttctgtatctaccaacctccagaggggcaacagacaagcagctaccgcagatgtcaacacacaaggcgttcttccaggcatggtctggcaggacagagatgtgtaccttcaggggcccatctgggcaaagattccacacacggacggacattttcacccctctcccctcatgggtggattcggacttaaacaccctcctccacagattctcatcaagaacaccccggtacctgcgaatccttcgaccaccttcagtgcggcaaagtttgcttccttcatcacacagtactccacgggacaggtcagcgtggagatcgagtgggagctgcagaaggaaaacagcaaacgctggaatcccgaaattcagtacacttccaactacaacaagtctgttaatgtggactttactgtggacactaatggcgtgtattcagagcctcgccccattggcaccagatacctgactcgtaatctgtaa

SEQ ID NO: 2061 - DNA, 2208 bp, Artificial Sequence
  Synthetic Polynucleotide
atggctgccgatggttatcttccagattggctcgaggacactctctctgaaggaataagacagtggtggaagctcaaacctggcccaccaccaccaaagcccgcagagcggcatagggacgacagcaggggtcttgtgcttcctgggtacaagtacctcggacccttcaacggactcgacaagggagagccggtcaacgaggcagacgccgcggccctcgagcacgacaaagcctacgaccggcagctcgacagcggagacaacccgtacctcaagtacaaccacgccgacgcggagtttcaggagcgccttaaagaagatacgtcttttgggggcaacctcggacgagcagtcttccaggcgaaaaagagggttcttgaacctctgggcctggttggggaacctgttaagacggctccgggaaaaaagaggccggtagagcactctcctgtggagccagactcctcctcgggaaccggaaaggcgggccagcagcctgcaagaaaaagattgaattttggtcagactggagacgcagactcagtacctgacccccagcctctcggacagccaccagcagccccctctggtctgggaactaatacgatggctacaggcagtggcgcaccaatggcagacaataacgagggcgccgacggagtgggtaattcctcgggaaattggcattgcgattccacatggatgggcgacagagtcatcaccaccagcacccgaacctgggccctgcccacctacaacaaccacctctacaaacaaatttccagccaatcaggagcctcgaacggcaatcactactttggctacagcaccccttgggggtattttgacttcaacagattccactgccacttttcaccacgtgactggcaaagactcatcaacaacaactggggattccgacccaagagactcaacttcaagctctttaacattcaagtcaaagaggtcacgcagaatgacggtacgacgacgattgccaataaccttaccagcacggttcaggtgtttactgactcggagtaccagctcccgtacgtcctcggctcggcgcatcaaggatgcctcccgccgttcccagcagacgtcttcatggtgccacagtatggatacctcaccctgaacaacgggagtcaggcagtaggacgctcttcattttactgcctggagtactttccttctcagatgctgcgtaccggaaacaactttaccttcagctacacttttgaggacgttcctttccacagcagctacgctcacagccagagtctggaccgtctcatgaatcctctcatcgaccagtacctgtattacttgagcagaacaaacactccaagtggaaccaccacgcagtcaaggcttcagttttctcaggccggagcgagtgacattcgggaccagtctaggaactggcttcctggaccctgttaccgccagcagcgagtatcaaagacatctgcggataacaacaacagtgaatactcgtggactggagctaccaagtaccacctcaatggcagagactctctggtgaatccgggcccggccatggcaagccacaaggacgatgaagaaaagttttttcctcagagcggggttctcatctttgggaagcaaggctcagagaaaacaaatgtggacattgaaaaggtcatgattacagacgaagaggaaatcaggacaaccaatcccgtggctacggagcagtatggttctgtatctaccaacctccagaggggcaacagacaagcagctaccgcagatgtcaacacacaaggcgttcttccaggcatggtctggcaggacagagatgtgtaccttcaggggcccatctgggcaaagattccacacacggacggacattttcacccctctcccctcatgggtggattcggacttaaacaccctcctccacagattctcatcaagaacaccccggtacctgcgaatccttcgaccaccttcagtgcggcaaagtttgcttccttcatcacacagtactccacgggacaggtcagcgtggagatcgagtgggagctgcagaaggaaaacagcaaacgctggaatcccgaaattcagtacacttccaactacaacaagtctgttaatgtggactttactgtggacactaatggcgtgtattcagagcctcgccccattggcaccagatacctgactcgtaatctgtaa

SEQ ID NO: 2062 - DNA, 2208 bp, Artificial Sequence
  Synthetic Polynucleotide
atggctgccgatggttatcttccagattggctcgaggacactctctctgaaggaataagacagtggtggaagctcaaacctggcccaccaccaccaaagcccgcagagcggcatagggacgacagcaggggtcttgtgcttcctgggtacaagtacctcggacccttcaacggactcgacaagggagagccggtcaacgaggcagacgccgcggccctcgagcacgacaaagcctacgaccggcagctcgacagcggagacaacccgtacctcaagtacaaccacgccgacgcggagtttcaggagcgccttaaagaagatacgtcttttgggggcaacctcggacgagcagtcttccaggcgaaaaagagggttcttgaacctctgggcctggttgaggaacctgttaagacggctccgggaaaaaagaggccggtagagcactctcctgtggagccagactcctcctcgggaaccggaaaggcgggccagcagcctgcaagaaaaagattgaattttggtcagactggagacgcagactcagtacctgacccccagcctctcggacagccaccagcagccccctctggtctgggaactaatacgatggctacaggcagtggcgcaccaatggcagacaataacgagggcgccgacggagtgggtaattcctcgggaaattggcattacgattccgcatggatgggcgacagagtcatcaccaccagcacccgaacctgggccctgcccacctacaacaaccacctctacaaacaaatttccagccaatcaggagcctcgaacggcaatcactactttggctacagcaccccttgggggtattttgacttcaacagattccactgccacttttcaccacgtgactggcaaagactcatcaacaacaactggggattccgacccaagagactcaacttcaagctctttaacattcaagtcaaagaggtcacgcagaatgacggtacgacgacgattgccaataaccttaccagcacggttcaggtgtttactgactcggagtaccagctcccgtacgtcctcggctcggcgcatcaaggatgcctcccgccgttcccagcagacgtcttcatggtgccacagtatggatacctcaccctgaacaacgggagtcaggcagtaggacgctcttcattttactgcctggagtactttccttctcagatgctgcgtaccggaaacaactttaccttcagctacacttttgaggacgttcctttccacagcagctacgctcacagccagagtctggaccgtctcatgaatcctctcatcgaccagtacctgtattacttgagcagaacaaacactccaagtggaaccaccacgcagtcaaggcttcagttttctcaggccggagcgagtgacattcgggaccagtctaggaactggcttcctggaccctgttaccgccagcagcgagtatcaaagacatctgcggataacaacaacagtgaatactcgtggactggagctaccaagtaccacctcaatggcagagactctctggtgaatccgggcccggccatggcaagccacaaggacgatgaagaaaagttttttcctcagagcggggttctcatctttgggaagcaaggctcagagaaaacaaatgtggacattgaaaaggtcatgattacagacgaagaggaaatcaggacaaccaatcccgtggctacggagcagtatggttctgtatctaccaacctccagaggggcaacagacaagcagctaccgcagatgtcaacacacaaggcgttcttccaggcatggtctggcaggacagagatgtgtaccttcaggggcccatctgggcaaagattccacacacggacggacattttcacccctctcccctcatgggtggattcggacttaaacaccctcctccacagattctcatcaagaacaccccggtacctgcgaatccttcgaccaccttcagtgcggcaaagtttgcttccttcatcacacagtactccacgggacaggtcagcgtggagatcgagtgggagctgcagaaggaaaacagcaaacgctggaatcccgaaattcagtacacttccaactacaacaagtctgttaatgtggactttactgtggacactaatggcgtgtattcagagcctcgccccattggcaccagatacctgactcgtaatctgtaa

SEQ ID NO: 2063 - DNA, 2208 bp, Artificial Sequence
  Synthetic Polynucleotide
atggctgccgatggttatcttccagattggctcgaggacactctctctgaaggaataagacagtggtggaagctcaaacctggcccaccaccaccaaagcccgcagagcggcatagggacgacagcaggggtcttgtgcttcctgggtacaagtacctcggacccttcaacggactcgacaagggagagccggtcaacgaggcagacgccgcggccctcgagcacgacaaagcctacgaccggcagctcgacagcggagacaacccgtacctcaagtacaaccacgccgacgcggagtttcaggagcgccttaaagaagatacgtcttttgggggcaacctcggacgagcagtcttccaggcgaaaaagagggttcttgaacctctgggcctggttgaggaacctgttaagacggctccgggaaaaaagaggccggtagagcactctcctgtggagccagactcctcctcgggaaccggaaaggcgggccagcagcctgcaagaaaaagattgaattttggtcagactggagacgcagactcagtacctgacccccagcctctcggacagccaccagcagccccctctggtctgggaactaatacgatggctacaggcagtggcgcaccaatggcagacaataacgagggcgccgacggagtgggtaattcctcgggaaattggcattgcgattccacatggatgggcgacagagtcatcaccaccagcacccgaacctgggccctgcccacctacaacaaccacctctacaaacaaatttccagccaatcaggagcctcgaacggcaatcactactttggctacagcaccccttgggggtattttgacttcaacagattccactgccacttttcaccacgtgactggcaaagactcatcaacaacaactggggattccgacccaagagactcaacttcaagctctttaacattcaagtcaaagaggtcacgcagaatgacggtacgacgacgattgccaataaccttaccagcacggttcaggtgtttactgactcggagtaccagctcccgtacgtcctcggctcggcgcatcaaggatgcctcccgccgttcccagcagacgtcttcatggtgccacagtatggatacctcaccctgaacaacgggagtcaggcagtaggacgctcttcattttactgcctggagtactttccttctcagatgctgcgtaccggaaacaactttaccttcagctacacttttgaggacgttcctttccacagcagctacgctcacagccagagtctggaccgtctcatgaatcctctcatcgaccagtacctgtattacttgagcagaacaaacactccaagtggaaccaccacgcagtcaaggcttcagttttctcaggccggagcgagtgacattcgggaccagtctaggaactggcttcctggaccctgttaccgccagcagcgagtatcaaagacatctgcggataacaacaacagtgaatactcgtggactggagctaccaagtaccacctcaatggcagagactctctggtgaatccgggcccggccatggcaagccacaaggacgatgaagaaaagttttttcctcagagcggggttctcatctttgggaagcaaggctcagagaaaacaaatgtggacattgaaaaggtcatgattacagacgaagaggaaatcaggacaaccaatcccgtggctacggagcagtatggttctgtatctaccaacctccagaggggcaacagacaagcagctaccgcagatgtcaacacacaaggcgttcttccaggcatggtctggcaggacagagatgtgtaccttcaggggcccatctgggcaaagattccacacacggacggacattttcacccctctcccctcatgggtggattcggacttaaacaccctcctccacagattctcatcaagaacaccccggtacctgcgaatccttcgaccaccttcagtgcggcaaagtttgcttccttcatcgcacagtactccacgggacaggtcagcgtggagatcgagtgggagctgcagaaggaaaacagcaaacgctggaatcccgaaattcagtacacttccaactacaacaagtctgttaatgtggactttactgtggacactaatggcgtgtattcagagcctcgccccattggcaccagatacctgactcgtaatctgtaa

SEQ ID NO: 2064 - DNA, 2208 bp, Artificial Sequence
  Synthetic Polynucleotide
atggctgccgatggttatcttccagattggctcgaggacactctctctgaaggaataagacagtggtggaagctcaaacctggcccaccaccaccaaagcccgcagagcggcatagggacgacagcaggggtcttgtgcttcctgggtacaagtacctcggacccttcaacggactcgacaagggagagccggtcaacgaggcagacgccgcggccctcgagcacgacaaagcctacgaccggcagctcgacagcggagacaacccgtacctcaagtacaaccacgccgacgcggagtttcaggagcgccttaaagaagatacgtcttttgggggcaacctcggacgagcagtcttccaggcgaaaaagagggttcttgaacctctgggcctggttgaggaacctgttaagacggctccgggaaaaaagaggccggtagagcactctcctgtggagccagactcctcctcgggaaccggaaaggcgggccagcagcctgcaagaaaaagattgaattttggtcagactggagacgcagactcagtacctgacccccagcctctcggacagccaccagcagccccctctggtctgggaactaatacgatggctacaggcagtggcgcaccaatggcagacaataacgagggcgccgacggagtgggtaattcctcgggaaattggcattgcgattccacatggatgggcgacagagtcatcaccaccagcacccgaacctgggccctgcccacctacaacaaccacctctacaaacaaatttccagccaatcaggagcctcgaacggcaatcactactttggctacagcaccccttgggggtattttgacttcaacagattccactgccacttttcaccacgtgactggcaaagactcatcaacaacaactggggattccgacccaagagactcaacttcaagctctttaacattcaagtcaaagaggtcacgcagaatgacggtacgacgacgattgccaataaccttaccagcacggttcaggtgtttactgactcggagtaccagctcccgtacgtcctcggctcggcgcatcaaggatgcctcccgccgttcccagcagacgtcttcatggtgccacagtatggatacctcaccctgaacaacgggagtcaggcagtaggacgctcttcattttactgcctggagtactttccttctcagatgctgcgtaccggaaacaactttaccttcagctacacttttgaggacgttcctttccacagcagctacgctcacagccagagtctggaccgtctcatgaatcctctcatcgaccagtacccgtattacttgagcagaacaaacactccaagtggaaccaccacgcagtcaaggcttcagttttctcaggccggagcgagtgacattcgggaccagtctaggaactggcttcctggaccctgttaccgccagcagcgagtatcaaagacatctgcggataacaacaacagtgaatactcgtggactggagctaccaagtaccacctcaatggcagagactctctggtgaatccgggcccggccatggcaagccacaaggacgatgaagaaaagttttttcctcagagcggggttctcatctttgggaagcaaggctcagagaaaacaaatgtggacattgaaaaggtcatgattacagacgaagaggaaatcaggacaaccaatcccgtggctacggagcagtatggttctgtatctaccaacctccagaggggcaacagacaagcagctaccgcagatgtcaacacacaaggcgttcttccaggcatggtctggcaggacagagatgtgtaccttcaggggcccatctgggcaaagattccacacacggacggacattttcacccctctcccctcatgggtggattcggacttaaacaccctcctccacagattctcatcaagaacaccccggtacctgcgaatccttcgaccaccttcagtgcggcaaagtttgcttccttcatcacacagtactccacgggacaggtcagcgtggagatcgagtgggagctgcagaaggaaaacagcaaacgctggaatcccgaaattcagtacacttccaactacaacaagtctgttaatgtggactttactgtggacactaatggcgtgtattcagagcctcgccccattggcaccagatacctgactcgtaatctgtaa

SEQ ID NO: 2065 - DNA, 2208 bp, Artificial Sequence
  Synthetic Polynucleotide
atggctgccgatggttatcttccagattggctcgaggacactctctctgaaggaataagacagtggtggaagctcaaacctggcccaccaccaccaaagcccgcagagcggcatagggacgacagcaggggtcttgtgcttcctgggtacaagtacctcggacccttcaacggactcgacaagggagagccggtcaacgaggcagacgccgcggccctcgagcacgacaaagcctacgaccggcagctcgacagcggagacaacccgtacctcaagtacaaccacgccgacgcggagtttcaggagcgccttaaagaagatacgtcttttgggggcaacctcggacgagcagtcttccaggcgaaaaagagggttcttgaacctctgggcctggttgaggaacctgttaagacggctccgggaaaaaagaggccggtagagcactctcctgtggagccagactcctcctcgggaaccggaaaggcgggccagcagcctgcaagaaaaagattgaattttggtcagactggagacgcagactcagtacctgacccccagcctctcggacagccaccagcagccccctctggtctgggaactaatacgatggctacaggcagtggcgcaccaatggcagacaataacgagggcgccgacggagtgggtaattcctcgggaaattggcattgcgattccacatggatgggcgacagagtcatcaccaccagcacccgaacctgggccctgcccacctacaacaaccacctctacaaacaaatttccagccaatcaggagcctcgaacggcaatcactactttggctacagcaccccttgggggtattttgacttcaacagattccactgccacttttcaccacgtgaccggcaaagactcatcaacaacaactggggattccgacccaagagactcaacttcaagctctttaacattcaagtcaaagaggtcacgcagaatgacggtacgacgacgattgccaataaccttaccagcacggttcaggtgtttactgactcggagtaccagctcccgtacgtcctcggctcggcgcatcaaggatgcctcccgccgttcccagcagacgtcttcatggtgccacagtatggatacctcaccctgaacaacgggagtcaggcagtaggacgctcttcattttactgcctggagtactttccttctcagatgctgcgtaccggaaacaactttaccttcagctacacttttgaggacgttcctttccacagcagctacgctcacagccagagtctggaccgtctcatgaatcctctcatcgaccagtacctgtattacttgagcagaacaaacactccaagtggaaccaccacgcagtcaaggcttcagttttctcaggccggagcgagtgacattcgggaccagtctaggaactggcttcctggaccctgttaccgccagcagcgagtatcaaagacatctgcggataacaacaacagtgaatactcgtggactggagctaccaagtaccacctcaatggcagagactctctggtgaatccgggcccggccatggcaagccacaaggacgatgaagaaaagttttttcctcagagcggggttctcatctttgggaagcaaggctcagagaaaacaaatgtggacattgaaaaggtcatgattacagacgaagaggaaatcaggacaaccaatcccgtggctacggagcagtatggttctgtatctaccaacctccagaggggcaacagacaagcagctaccgcagatgtcaacacacaaggcgttcttccaggcatggtctggcaggacagagatgtgtaccttcaggggcccatctgggcaaagattccacacacggacggacattttcacccctctcccctcatgggtggattcggacttaaacaccctcctccacagattctcatcaagaacaccccggtacctgcgaatccttcgaccaccttcagtgcggcaaagtttgcttccttcatcacacagtactccacgggacaggtcagcgtggagatcgagtgggagctgcagaaggaaaacagcaaacgctggaatcccgaaattcagtacacttccaactacaacaagtctgttaatgtggactttactgtggacactaatggcgtgtattcagagcctcgccccattggcaccagatacctgactcgtaatctgtaa

SEQ ID NO: 2066 - DNA, 2208 bp, Artificial Sequence
  Synthetic Polynucleotide
atggctgccgatggttatcttccagattggctcgaggacactctctctgaaggaataagacagtggtggaagctcaaacctggcccaccaccaccaaagcccgcagagcggcatagggacgacagcaggggtcttgtgcttcctgggtacaagtacctcggacccttcaacggactcgacaagggagagccggtcaacgaggcagacgccgcggccctcgagcacgacaaagcctacgaccggcagctcgacagcggagacaacccgtacctcaagtacaaccacgccgacgcggagtttcaggagcgccttaaagaagatacgtcttttgggggcaacctcggacgagcagtcttccaggcgaaaaagagggttcttgaacctctgggcctggttgaggaacctgttaagacggctccgggaaaaaagaggccggtagagcactctcctgtggagccagactcctcctcgggaaccggaaaggcgggccagcagcctgcaagaaaaagattgaattttggtcagactggagacgcagactcagtacctgacccccagcctctcggacagccaccagcagccccctctggtctgggaactaatacgatggctacaggcagtggcgcaccaatggcagacaataacgagggcgccgacggagtgggtaattcctcgggaaattggcattgcgattccacatggatgggcgacagagtcatcaccaccagcacccgaacctgggccctgcccacctacaacaaccacctctacaaacaaatttccagccaatcaggagcctcgaacggcaatcactactttggctacagcaccccttgggggtattttgacttcaacagattccactgccacttttcaccacgtgactggcaaagactcatcaacaacaactggggattccgacccaagagactcaacttcaagctctttaacattcaagtcaaagaggtcacgcagaatgacggtacgacgacgattgccaataaccttaccagcacggttcaggtgtttactgactcggagtaccagctcccgtacgtcctcggctcggcgcatcaaggatgcctcccgccgttcccagcagacgtcttcatggtgccacagtatggatacctcaccctgaacaacgggagtcaggcagtaggacgctcttcattttactgcctggagtactttccttctcagatgctgcgtaccggaaacaactttaccttcagctacacttttgaggacgttcctttccacagcagctacgctcacagccagagtctggaccgtctcatgaatcctctcatcgaccagtacctgtattacttgagcagaacaaacactccaagtggaaccaccacgcagtcaaggcttcagttttctcaggccggagcgagtgacattcgggaccagtctaggaactggcttcctggaccctgttaccgccagcagcgagtatcaaagacatctgcggataacaacaacagtgaatactcgtggactggagctaccaagtaccacctcaatggcagagactctctggtgaatccgggcccggccatggcaagccacaaggacgatgaagaaaagttttttcctcagagcggggttctcatctttgggaagcaaggctcagagaaaacaaatgtggacattgaaaaggtcatgattacagacgaagaggaaatcaggacaaccaatcccgtggctacggagcagtatggttctgtatctaccaacctccagaggggcaacagacaagcagctaccgcagatgtcaacacacaaggcgttcttccaggcatggtctggcaggacagagatgtgtaccttcaggggcccatctgggcaaagattccacacacggacggacattttcacccctctcccctcatgggtggattcggacttaaacaccctcctccacagattctcatcaagaacaccccggtacctgcgaatccttcgaccaccttcagtgcggcaaagtttgcttccttcatcacacagtactccacgggacaggtcagcgtggagatcgagtgggagctgcagaaggaaaacagcaaacgctggaatcccgaaattcagtacacttccaactacaacaagtctgttaatgtggaccttactgtggacactaatggcgtgtattcagagcctcgccccattggcaccagatacctgactcgtaatctgtaa

SEQ ID NO: 2067 - DNA, 2208 bp, Artificial Sequence
  Synthetic Polynucleotide
atggctgccgatggttatcttccagattggctcgaggacactctctctgaaggaataagacagtggtggaagctcaaacctggcccaccaccaccaaagcccgcagagcggcatagggacgacagcaggggtcttgcgcttcctgggtacaagtacctcggacccttcaacggactcgacaagggagagccggtcaacgaggcagacgccgcggccctcgagcacgacaaagcctacgaccggcagctcgacagcggagacaacccgtacctcaagtacaaccacgccgacgcggagtttcaggagcgccttaaagaagatacgtcttttgggggcaacctcggacgagcagtcttccaggcgaaaaagagggttcttgaacctctgggcctggttgaggaacctgttaagacggctccgggaaaaaagaggccggtagagcactctcctgtggagccagactcctcctcgggaaccggaaaggcgggccagcagcctgcaagaaaaagattgaattttggtcagactggagacgcagactcagtacctgacccccagcctctcggacagccaccagcagccccctctggtctgggaactaatacgatggctacaggcagtggcgcaccaatggcagacaataacgagggcgccgacggagtgggtaattcctcgggaaattggcattgcgattccacatggatgggcgacagagtcatcaccaccagcacccgaacctgggccctgcccacctacaacaaccacctctacaaacaaatttccagccaatcaggagcctcgaacggcaatcactactttggctacagcaccccttgggggtattttgacttcaacagattccactgccacttttcaccacgtgactggcaaagactcatcaacaacaactggggattccgacccaagagactcaacttcaagctctttaacattcaagtcaaagaggtcacgcagaatgacggtacgacgacgattgccaataaccttaccagcacggttcaggtgtttactgactcggagtaccagctcccgtacgtcctcggctcggcgcatcaaggatgcctcccgccgttcccagcagacgtcttcatggtgccacagtatggatacctcaccctgaacaacgggagtcaggcagtaggacgctcttcattttactgcctggagtactttccttctcagatgctgcgtaccggaaacaactttaccttcagctacacttttgaggacgttcctttccacagcagctacgctcacagccagagtctggaccgtctcatgaatcctctcatcgaccagtacctgtattacttgagcagaacaaacactccaagtggaaccaccacgcagtcaaggcttcagttttctcaggccggagcgagtgacattcgggaccagtctaggaactggcttcctggaccctgttaccgccagcagcgagtatcaaagacatctgcggataacaacaacagtgaatactcgtggactggagctaccaagtaccacctcaatggcagagactctctggtgaatccgggcccggccatggcaagccacaaggacgatgaagaaaagttttttcctcagagcggggttctcatctttgggaagcaaggctcagagaaaacaaatgtggacattgaaaaggtcatgattacagacgaagaggaaatcaggacaaccaatcccgtggctacggagcagtatggttctgtatctaccaacctccagaggggcaacagacaagcagctaccgcagatgtcaacacacaaggcgttcttccaggcatggtctggcaggacagagatgtgtaccttcaggggcccatctgggcaaagattccacacacggacggacattttcacccctctcccctcatgggtggattcggacttaaacaccctcctccacagattctcatcaagaacaccccggtacctgcgaatccttcgaccaccttcagtgcggcaaagtttgcttccttcatcacacagtactccacgggacaggtcagcgtggagatcgagtgggagctgcagaaggaaaacagcaaacgctggaatcccgaaattcagtacacttccaactacaacaagtctgttaatgtggactttactgtggacactaatggcgtgtattcagagcctcgccccattggcaccagatacctgactcgtaatctgtaa

SEQ ID NO: 2068 - DNA, 2208 bp, Artificial Sequence
  Synthetic Polynucleotide
atggctgccgatggttatcttccagattggctcgaggacactctctctgaaggaataagacagtggtggaagctcaaacctggcccaccaccaccaaagcccgcagagcggcatagggacgacagcaggggtcttgtgcttcctgggtacaagtacctcggacccttcaacggactcgacaagggagagccggtcaacgaggcagacgccgcggccctcgagcacgacaaagcctacgaccggcagctcgacagcggagacaacccgtacctcaagtacaaccacgccgacgcggagtttcaggagcgccttaaagaagatacgtcttttgggggcaacctcggacgagcagtcttccaggcgaaaaagagggttcttgaacctctgggcctggttgaggaacctgttaagacggctccgggaaaaaagaggccggtagagcactctcctgtggagccagactcctcctcgggaaccggaaaggcgggccagcagcctgcaagaaaaagattgaattttggtcagactggagacgcagactcagtacctgacccccagcctctcggacagccaccagcagccccctctggtctgggaactaatacgatggctacaggcagtggcgcaccaatggcagacaataacgagggcgccgacggagtgggtaattcctcgggaaattggcattgcgattccacatggatgggcgacagagtcatcaccaccagcacccgaacctgggccctgcccacctacaacaaccacctctacaaacaaatttccagccaatcaggagcctcgaacggcaatcactactttggctacagcaccccttgggggtattttgacttcaacagattccactgccacttttcaccacgtgactggcaaagactcatcaacaacaactggggattccgacccaagagactcaacttcaagctctttaacattcaagtcaaagaggtcacgcagaatgacggtacgacgacgattgccaataaccttaccagcacggttcaggtgtttactgactcggagtaccagctcccgtacgtcctcggctcggcgcatcaaggatgcctcccgccgttcccagcagacgtcttcatggtgccacagtatggatacctcaccctgaacaacgggagtcaggcagtaggacgctcttcattttactgcctggagtactttccttctcagatgctgcgtaccggaaacaactttaccttcagctacacttttgaggacgttcctttccacagcagctacgctcacagccagagtctggaccgtctcatgaatcctctcatcgaccagtacctgtattacttgagcagaacaaacactccaagtggaaccaccacgcagtcaaggcttcagttttctcaggccggagcgagtgacattcgggaccagtctaggaactggcttcctggaccctgttaccgccagcagcgagtatcaaagacatctgcggataacaacaacagtgaatactcgtggactggagctaccaagtaccacctcaatggcagagactctctggtgaatccgggcccggccatggcaagccacaaggacgatgaagaaaagttttttcctcagagcggggttctcatctttgggaagcaaggctcagagaaaacaaatgtggacattgaaaaggtcatgattacagacgaagaggaaatcaggacaaccaatcccgtggctacggagcagtatggttctgtatctaccaacctccagaggggcaacagacaagcagctaccgcagatgccaacacacaaggcgttcttccaggcatggtctggcaggacagagatgtgtaccttcaggggcccatctgggcaaagattccacacacggacggacattttcacccctctcccctcatgggtggattcggacttaaacaccctcctccacagattctcatcaagaacaccccggtacctgcgaatccttcgaccaccttcagtgcggcaaagtttgcttccttcatcacacagtactccacgggacaggtcagcgtggagatcgagtgggagctgcagaaggaaaacagcaaacgctggaatcccgaaattcagtacacttccaactacaacaagtctgttaatgtggactttactgtggacactaatggcgtgtattcagagcctcgccccattggcaccagatacctgactcgtaatctgtaa

SEQ ID NO: 2069 - DNA, 2208 bp, Artificial Sequence
  Synthetic Polynucleotide
atggctgccgatggttatcttccagattggctcgaggacactctctctgaaggaataagacagtggtggaagctcaaacctggcccaccaccaccaaagcccgcagagcggcatagggacgacagcaggggtcttgtgcttcctgggtacaagtacctcggacccttcaacggactcgacaagggagagccggtcaacgaggcagacgccgcggccctcgagcacgacaaagcctacgaccggcagctcgacagcggagacaacccgtacctcaagtacaaccacgccgacgcggagtttcaggagcgccttaaagaagatacgtcttttgggggcaacctcggacgagcagtcttccaggcgaaaaagagggttcttgaacctctgggcctggttgaggaacctgttaagacggctccgggaaaaaagaggccggtagagcactctcctgtggagccagactcctcctcgggaaccggaaaggcgggccagcagcctgcaagaaaaagattgaattttggtcagactggagacgcagactcagtacctgacccccagcctctcggacagccaccagcagccccctctggtctgggaactaatacgatggctacaggcagtggcgcaccaatggcagacaataacgagggcgccgacggagtgggtaattcctcgggaaattggcattgcgattccacatggatgggcgacagagtcatcaccaccagcacccgaacctgggccctgcccacctacaacaaccacctctacaaacaaatttccagccaatcaggagcctcgaacggcaatcactactttggctacagcaccccttgggggtattttgacttcaacagattccactgccacttttcaccacgtgactggcaaagactcatcaacaacaactggggattccgacccaagagactcaacttcaagctctttaacattcaagtcaaagaggtcacgcagaatgacggtacgacgacgattgccaataaccttaccagcacggttcaggtgtttactgactcggagtaccagctcccgtacgtcctcggctcggcgcatcaaggatgcctcccgccgttcccagcagacgtcttcatggtgccacagtatggatacctcaccctgaacaacgggagtcaggcagtaggacgctcttcattttactgcctggagtactttccttctcagatgctgcgtaccggaaacaactttaccttcagctacacttttgaggacgttcctttccacagcagctacgctcacagccagagtctggaccgtctcatgaatcctctcatcgaccagtacctgtattacttgagcagaacaaacactccaagtggaaccaccacgcagtcaaggcttcagttttctcaggccggagcgagtgacattcgggaccagtctaggaactggcttcctggaccctgttaccgccagcagcgagtatcaaagacatctgcggataacaacaacagtgaatactcgtggactggagctaccaagtaccacctcaatggcagagactctctggtgaatccgggcccggccatggcaagccacaaggacgatgaagaaaagttttttcctcagagcggggttctcatctttgggaagcaaggctcagagaaaacaaatgtggacattgaaaaggtcatgattacagacgaaggggaaatcaggacaaccaatcccgtggctacggagcagtatggttctgtatctaccaacctccagaggggcaacagacaagcagctaccgcagatgtcaacacacaaggcgttcttccaggcatggtctggcaggacagagatgtgtaccttcaggggcccatctgggcaaagattccacacacggacggacattttcacccctctcccctcatgggtggattcggacttaaacaccctcctccacagattctcatcaagaacaccccggtacctgcgaatccttcgaccaccttcagtgcggcaaagtttgcttccttcatcacacagtactccacgggacaggtcagcgtggagatcgagtgggagctgcagaaggaaaacagcaaacgctggaatcccgaaattcagtacacttccaactacaacaagtctgttaatgtggactttactgtggacactaatggcgtgtattcagagcctcgccccattggcaccagatacctgactcgtaatctgtaa

SEQ ID NO: 2070 - DNA, 2208 bp, Artificial Sequence
  Synthetic Polynucleotide
atggctgccgatggttatcttccagattggctcgaggacactctctctgaaggaataagacagtggtggaagctcaaacctggcccaccaccaccaaagcccgcagagcggcatagggacgacagcaggggtcttgtgcttcctgggtacaagtacctcggacccttcaacggactcgacaagggagagccggtcaacgaggcagacgccgcggccctcgagcacgacaaagcctacgaccggcagctcgacagcggagacaacccgtacctcaagtacaaccacgccgacgcggagtttcaggagcgccttaaagaagatacgtcttttgggggcaacctcggacgagcagtcttccaggcgaaaaagagggttcttgaacctctgggcctggttgaggaacctgttaagacggctccgggaaaaaagaggccggtagagcactctcctgtggagccagactcctcctcgggaaccggaaaggcgggccagcagcctgcaagaaaaagattgaattttggtcagactggagacgcagactcagtacctgacccccagcctctcggacagccaccagcagccccctctggtctgggaactaatacgatggctacaggcagtggcgcaccaatggcagacaataacgagggcgccgacggagtgggtaattcctcgggaaattggcattgcgattccacatggatgggcgacagagtcatcaccaccagcacccgaacctgggccctgcccacctacaacaaccacctctacaaacaaatttccagccaatcaggagcctcgaacggcaatcactactttggctacagcaccccttgggggtattttgacttcaacagattccactgccacttttcaccacgtgactggcaaagactcatcaacaacaactggggattccgacccaagagactcaacttcaagctctttaacattcaagtcaaagaggtcacgcagaatgacggtacgacgacgattgccaataaccttaccagcacggttcaggtgtttactgactcggagtaccagctcccgtacgtcctcggctcggcgcatcaaggatgcctcccgccgttcccagcagacgtcttcatggtgccacagtatggatacctcaccctgaacaacgggagtcaggcagtaggacgctcttcattttactgcctggagtactttccttctcagatgctgcgtaccggaaacaactttaccttcagctacacttttgaggacgttcctttccacagcagctacgctcacagccagagtctggaccgtctcatgaatcctctcatcgaccagtacctgtattacttgagcagaacaaacactccaagtggaaccaccacgcagtcaaggcttcagttttctcaggccggagcgagtgacattcgggaccagtctaggaactggcttcctggaccctgttaccgccagcagcgagtatcaaagacatctgcggataacaacaacagtgaatactcgtggactggagctaccaagtaccacctcaatggcagagactctctggtgaatccgggcccggccatggcaagccacaaggacgatgaagaaaagttttttcctcagagcggggttctcatctttgggaagcaaggctcagagaaaacaaatgtggacattgaaaaggtcatgattacagacgaagaggaaatcaggacaaccaatcccgtggctacggagcagtatggttctgtatctaccaacctccagaggggcaacagacaagcagctaccgcagatgtcaacacacaaggcgttcttccaggcatggtctggcaggacagagatgtgtaccttcaggggcccatctgggcaaagattccacacacggacggacattttcacccctctccccccatgggtggattcggacttaaacaccctcctccacagattctcatcaagaacaccccggtacctgcgaatccttcgaccaccttcagtgcggcaaagtttgcttccttcatcacacagtactccacgggacaggtcagcgtggagatcgagtgggagctgcagaaggaaaacagcaaacgctggaatcccgaaattcagtacacttccaactacaacaagtctgttaatgtggactttactgtggacactaatggcgtgtattcagagcctcgccccattggcaccagatacctgactcgtaatctgtaa

SEQ ID NO: 2071 - DNA, 2208 bp, Artificial Sequence
  Synthetic Polynucleotide
atggctgccgatggttatcttccagattggctcgaggacactctctctgaaggaataagacagtggtggaagctcaaacctggcccaccaccaccaaagcccgcagagcggcatagggacgacagcaggggtcttgtgcttcctgggtacaagtacctcggacccttcaacggactcgacaagggagagccggtcaacgaggcagacgccgcggccctcgagcacgacaaagcctacgaccggcagctcgacagcggagacaacccgtacctcaagtacaaccacgccgacgcggagtttcaggagcgccttaaagaagatacgtcttttgggggcaacctcggacgagcagtcttccaggcgaaaaagagggttcttgaacctctgggcctggttgaggaacctgttaagacggctccgggaaaaaagaggccggtagagcactctcctgtggagccagactcctcctcgggaaccggaaaggcgggccagcagcctgcaagaaaaagattgaattttggtcagactggagacgcagactcagtacctgacccccagcctctcggacagccaccagcagccccctctggtctgggaactaatacgatggctacaggcagtggcgcaccaatggcagacaataacgagggcgccgacggagtgggtaattcctcgggaaattggcattgcgattccacatggatgggcgacagagtcatcaccaccagcacccgaacctgggccctgcccacctacaacaaccacctctacaaacaaatttccagccaatcaggagcctcgaacggcaatcactactttggctacagcaccccttgggggtattttgacttcaacagattccactgccacttttcaccacgtgactggcaaagactcatcaacaacaactggggattccgacccaagagactcaacttcaagctctttaacattcaagtcaaagaggtcacgcagaatgacggtacgacgacgattgccaataaccttaccagcacggttcaggtgtttactgactcggagtaccagctcccgtacgtcctcggctcggcgcatcaaggatgcctcccgccgttcccagcagacgtcttcatggtgccacagtatggatacctcaccctgaacaacgggagtcaggcagtaggacgctcttcattttactgcctggagtactttccttctcagatgctgcgtaccggaaacaactttaccttcagctacacttttgaggacgttcctttccacagcagctacgctcacagccagagtctggaccgtctcatgaatcctctcatcgaccagtacctgtattacttgagcagaacaaacactccaagtggaaccaccacgcagtcaaggcttcagttttctcaggccggagcgagtgacattcgggaccagtctaggaactggcttcctggaccctgttaccgccagcagcgagtatcaaagacatctgcggataacaacaacagtgaatactcgtggactggagctaccaagtaccacctcaatggcagagactctctggtgaatccgggcccggccatggcaagccacaaggacgatgaagaaaagttttttcctcagagcggggttctcatctttgggaagcaaggctcagagaaaacaaatgtggacattgaaaaggtcatgattacagacgaagaggaaatcaggacaaccaatcccgtggctacggagcagtatggttctgtatctaccaacctccagaggggcaacagacaagcagctaccgcagatgtcaacacacaaggcgttcttccaggcatggtctggcaggacagagatgtgtaccttcaggggcccatctgggcaaagattccacacacggacggacattttcacccctctcccctcatgggtggattcggacttaaacaccctcctccacagattctcatcaagaacaccccggtacctgcgaatccttcgaccaccttcagtgcggcaaagtttgcttccttcatcacacagtactccacgggacaggtcagcgtggagatcgagtgggagctgcagaaggaaaacagcaaacgctggaatcccgaaattcagtacacttccgactacaacaagtctgttaatgtggactttactgtggacactaatggcgtgtattcagagcctcgccccattggcaccagatacctgactcgtaatctgtaa

SEQ ID NO: 2072 - DNA, 2208 bp, Artificial Sequence
  Synthetic Polynucleotide
atggctgccgatggttatcttccagattggctcgaggacactctctctgaaggaataagacagtggtggaagctcaaacctggcccaccaccaccaaagcccgcagagcggcatagggacgacagcaggggtcttgtgcttcctgggtacaagtacctcggacccttcaacggactcgacaagggagagccggtcaacgaggcagacgccgcggccctcgagcacgacaaagcctacgaccggcagctcgacagcggagacaacccgtacctcaagtacaaccacgccgacgcggagtttcaggagcgccttaaagaagatacgtcttttgggggcaacctcggacgagcagtcttccaggcgaaaaagagggttcttgaacctctgggcctggttgaggaacctgttaagacggctccgggaaaaaagaggccggtagagcactctcctgtggagccagactcctcctcgggaaccggaaaggcgggccagcagcctgcaagaaaaagattgaattttggtcagactggagacgcagactcagtacctgacccccagcctctcggacagccaccagcagccccctctggtctgggaactaatacgatggctacaggcagtggcgcaccaatggcagacaataacgagggcgccgacggagtgggtaattcctcgggaaattggcattgcgattccacatggatgggcgacagagtcatcaccaccagcacccgaacctgggccctgcccacctacaacaaccacctctacaaacaaatttccagccaatcaggagcctcgaacggcaatcactactttggctacagcaccccttgggggtattttgacttcaacagattccactgccacttttcaccacgtgactggcaaagactcatcaacaacaactggggattccgacccaagagactcaacttcaagctctttaacattcaagtcaaagaggtcacgcagaatggcggtacgacgacgattgccaataaccttaccagcacggttcaggtgtttactgactcggagtaccagctcccgtacgtcctcggctcggcgcatcaaggatgcctcccgccgttcccagcagacgtcttcatggtgccacagtatggatacctcaccctgaacaacgggagtcaggcagtaggacgctcttcattttactgcctggagtactttccttctcagatgctgcgtaccggaaacaactttaccttcagctacacttttgaggacgttcctttccacagcagctacgctcacagccagagtctggaccgtctcatgaatcctctcatcgaccagtacctgtattacttgagcagaacaaacactccaagtggaaccaccacgcagtcaaggcttcagttttctcaggccggagcgagtgacattcgggaccagtctaggaactggcttcctggaccctgttaccgccagcagcgagtatcaaagacatctgcggataacaacaacagtgaatactcgtggactggagctaccaagtaccacctcaatggcagagactctctggtgaatccgggcccggccatggcaagccacaaggacgatgaagaaaagttttttcctcagagcggggttctcatctttgggaagcaaggctcagagaaaacaaatgtggacattgaaaaggtcatgattacagacgaagaggaaatcaggacaaccaatcccgtggctacggagcagtatggttctgtatctaccaacctccagaggggcaacagacaagcagctaccgcagatgtcaacacacaaggcgttcttccaggcatggtctggcaggacagagatgtgtaccttcaggggcccatctgggcaaagattccacacacggacggacattttcacccctctcccctcatgggtggattcggacttaaacaccctcctccacagattctcatcaagaacaccccggtacctgcgaatccttcgaccaccttcagtgcggcaaagtttgcttccttcatcacacagtactccacgggacaggtcagcgtggagatcgagtgggagctgcagaaggaaaacagcaaacgctggaatcccgaaattcagtacacttccaactacaacaagtctgttaatgtggactttactgtggacactaatggcgtgtattcagagcctcgccccattggcaccagatacctgactcgtaatctgtaa

SEQ ID NO: 2073 - DNA, 2208 bp, Artificial Sequence
  Synthetic Polynucleotide
atggctgccgatggttatcttccagattggctcgaggacactctctctgaaggaataagacagtggtggaagctcaaacctggcccaccaccaccaaagcccgcagagcggcatagggacgacagcaggggtcttgtgcttcctgggtacaagtacctcggacccttcaacggactcgacaagggagagccggtcaacgaggcagacgccgcggccctcgagcacgacaaagcctacgaccggcagctcgacagcggagacaacccgtacctcaagtacaaccacgccgacgcggagtttcaggagcgccttaaagaagatacgtcttttgggggcaacctcggacgagcagtcttccaggcgaaaaagagggttcttgaacctctgggcctggttgaggaacctgttaagacggctccgggaaaaaagaggccggtagagcactctcctgtggagccagactcctcctcgggaaccggaaaggcgggccagcagcctgcaagaaaaagattgaattttggtcagactggagacgcagactcagtacctgacccccagcctctcggacagccaccagcagccccctctggtctgggaactaatacgatggctacaggcagtggcgcaccaatggcagacaataacgagggcgccgacggagtgggtaattcctcgggaaattggcattgcgattccacatggatgggcgacagagtcatcaccaccagcacccgaacctgggccctgcccacctacaacaaccacctctacaaacaaatttccagccaatcaggagcctcgaacggcaatcactactttggctacagcaccccttgggggtattttgacttcaacagattccactgccacttttcaccacgtgactggcaaagactcatcaacaacaactggggattccgacccaagagactcaacttcaagctctttaacattcaagtcaaagaggtcacgcagaatgacggtacgacgacgattgccaataaccttaccagcacggttcaggtgtttactgactcggagtaccagctcccgtacgtcctcggctcggcgcatcaaggatgcctcccgccgttcccagcagacgtcttcatggtgccacagtatggatacctcaccctgaacaacgggagtcaggcagtaggacgctcttcattttactgcctggagtactttccttctcagatgctgcgtaccggaaacaactttaccttcagctacacttttgaggacgttcctttccacagcagctacgctcacagccagagtctggaccgtctcatgaatcctctcatcgaccagtacctgtattacttgagcagaacaaacactccaagtggaaccaccacgcagtcaaggcttcagttttctcaggccgtagcgagtgacgttcgggaccagtctaggaactggcttcctggaccctgttaccgccagcagcgagtatcaaagacatctgcggataacaacaacagtgaatactcgtggactggagctaccaagtaccacctcaatggcagagactctctggtgaatccgggcccggccatggcaagccacaaggacgatgaagaaaagttttttcctcagagcggggttctcatctttgggaagcaaggctcagagaaaacaaatgtggacattgaaaaggtcatgattacagacgaagaggaaatcaggacaaccaatcccgtggctacggagcagtatggttctgtatctaccaacctccagaggggcaacagacaagcagctaccgcagatgtcaacacacaaggcgttcttccaggcatggtctggcaggacagagatgtgtaccttcaggggcccatctgggcaaagattccacacacggacggacattttcacccctctcccctcatgggtggattcggacttaaacaccctcctccacagattctcatcaagaacaccccggtacctgcgaatccttcgaccaccttcagtgcggcaaagtttgcttccttcatcacacagtactccacgggacaggtcagcgtggagatcgagtgggagctgcagaaggaaaacagcaaacgctggaatcccgaaattcagtacacttccaactacaacaagtctgttaatgtggactttactgtggacactaatggcgtgtattcagagcctcgccccattggcaccagatacctgactcgtaatctgtaa

SEQ ID NO: 2074 - DNA, 2208 bp, Artificial Sequence
  Synthetic Polynucleotide
atggctgccgatggttatcttccagattggctcgaggacactctctctgaaggaataagacagcggtggaagctcaaacctggcccaccaccaccaaagcccgcagagcggcatagggacgacagcaggggtcttgtgcttcctgggtacaagtacctcggacccttcaacggactcgacaagggagagccggtcaacgaggcagacgccgcggccctcgagcacgacaaagcctacgaccggcagctcgacagcggagacaacccgtacctcaagtacaaccacgccgacgcggagtttcaggagcgccttaaagaagatacgtcttttgggggcaacctcggacgagcagtcttccaggcgaaaaagagggttcttgaacctctgggcctggttgaggaacctgttaagacggctccgggaaaaaagaggccggtagagcactctcctgtggagccagactcctcctcgggaaccggaaaggcgggccagcagcctgcaagaaaaagattgaattttggtcagactggagacgcagactcagtacctgacccccagcctctcggacagccaccagcagccccctctggtctgggaactaatacgatggctacaggcagtggcgcaccaatggcagacaataacgagggcgccgacggagtgggtaattcctcgggaaattggcattgcgattccacatggatgggcgacagagtcatcaccaccagcacccgaacctgggccctgcccacctacaacaaccacctctacaaacaaatttccagccaatcaggagcctcgaacggcaatcactactttggctacagcaccccttgggggtattttgacttcaacagattccactgccacttttcaccacgtgactggcaaagactcatcaacaacaactggggattccgacccaagagactcaacttcaagctctttaacattcaagtcaaagaggtcacgcagaatgacggtacgacgacgattgccaataaccttaccagcacggttcaggtgtttactgactcggagtaccagctcccgtacgtcctcggctcggcgcatcaaggatgcctcccgccgttcccagcagacgtcttcatggtgccacagtatggatacctcaccctgaacaacgggagtcaggcagtaggacgctcttcattttactgcctggagtactttccttctcagatgctgcgtaccggaaacaactttaccttcagctacacttttgaggacgttcctttccacagcagctacgctcacagccagagtctggaccgtctcatgaatcctctcatcgaccagtacctgtattacttgagcagaacaaacactccaagtggaaccaccacgcagtcaaggcttcagttttctcaggccggagcgagtgacattcgggaccagtctaggaactggcttcctggaccctgttaccgccagcagcgagtatcaaagacatctgcggataacaacaacagtgaatactcgtggactggagctaccaagtaccacctcaatggcagagactctctggtgaatccgggcccggccatggcaagccacaaggacgatgaagaaaagttttttcctcagagcggggttctcatctttgggaagcaaggctcagagaaaacaaatgtggacattgaaaaggtcatgattacagacgaagaggaaatcaggacaaccaatcccgtggctacggagcagtatggttctgtatctaccaacctccagaggggcaacagacaagcagctaccgcagatgtcaacacacaaggcgttcttccaggcatggtctggcaggacagagatgtgtaccttcaggggcccatctgggcaaagattccacacacggacggacattttcacccctctcccctcatgggtggattcggacttaaacaccctcctccacagattctcatcaagaacaccccggtacctgcgaatccttcgaccaccttcagtgcggcaaagtttgcttccttcatcacacagtactccacgggacaggtcagcgtggagatcgagtgggagctgcagaaggaaaacagcaaacgctggaatcccgaaattcagtacacttccaactacaacaagtctgttaatgtggactttactgtggacactaatggcgtgtattcagagcctcgccccattggcaccagatacctgactcgtaatctgtaa

SEQ ID NO: 2075 - DNA, 2208 bp, Artificial Sequence
  Synthetic Polynucleotide
atggctgccgatggttatcttccagattggctcgaggacactctctctgaaggaataagacagtggtggaagctcaaacctggcccaccaccaccaaagcccgcagagcggcataaggacgacagcaggggtcttgtgcttcctgggtacaagtacctcggacccttcaacggactcgacaagggagagccggtcaacgaggcagacgccgcggccctcgagcacgacaaagcctacgaccggcagctcgacagcggagacaacccgtacctcaagtacaaccacgccgacgcggagtttcaggagcgccttaaagaagatacgtcttttgggggcaacctcggacgagcagtcttccaggcgaaaaagagggttcttgaacctctgggcctggttgaggaacctgttaagacggctccgggaaaaaagaggccggtagagcactctcctgtggagccagactcctcctcgggaaccggaaaggcgggccagcagcctgcaagaaaaagattgaattttggtcagactggagacgcagactcagtacctgacccccagcctctcggacagccaccagcagccccctctggtctgggaactaatacgatggctacaggcagtggcgcaccaatggcagacaataacgagggcgccgacggagtgggtaattcctcgggaaattggcattgcgattccacatggatgggcgacagagtcatcaccaccagcacccgaacctgggccctgcccacctacaacaaccacctctacaaacaaatttccagccaatcaggagcctcgaacgacaatcactactttggctacagcaccccttgggggtattttgacttcaacagattccactgccacttttcaccacgtgactggcaaagactcatcaacaacaactggggattccgacccaagagactcaacttcaagctctttaacattcaagtcaaagaggtcacgcagaatgacggtacgacgacgattgccaataaccttaccagcacggttcaggtgtttactgactcggagtaccagctcccgtacgtcctcggctcggcgcatcaaggatgcctcccgccgttcccagcagacgtcttcatggtgccacagtatggatacctcaccctgaacaacgggagtcaggcagtaggacgctcttcattttactgcctggagtactttccttctcagatgctgcgtaccggaaacaactttaccttcagctacacttttgaggacgttcctttccacagcagctacgctcacagccagagtctggaccgtctcatgaatcctctcatcgaccagtacctgtattacttgagcagaacaaacactccaagtggaaccaccacgcagtcaaggcttcagttttctcaggccggagcgagtgacattcgggaccagtctaggaactggcttcctggaccctgttaccgccagcagcgagtatcaaagacatctgcggataacaacaacagtgaatactcgtggactggagctaccaagtaccacctcaatggcagagactctctggtgaatccgggcccggccatggcaagccacaaggacgatgaagaaaagttttttcctcagagcggggttctcatctttgggaagcaaggctcagagaaaacaaatgtggacattgaaaaggtcatgactacagacgaagaggaaatcaggacaaccaatcccgtggctacggagcagtatggttctgtatctaccaacctccagaggggcaacagacaagcagctaccgcagatgtcaacacacaaggcgttcttccaggcatggtctggcaggacagagatgtgtaccttcaggggcccatctgggcaaagattccacacacggacggacattttcacccctctcccctcatgggtggattcggacttaaacaccctcctccacagattctcatcaagaacaccccggtacctgcgaatccttcgaccaccttcagtgcggcaaagtttgcttccttcatcacacagtactccacgggacaggtcagcgtggagatcgagtgggagctgcagaaggaaaacagcaaacgctggaatcccgaaattcagtacacttccaactacaacaagtctgttaatgtggactttactgtggacactaatggcgtgtattcagagcctcgccccattggcaccagatacctgactcgtaatctgtaa

SEQ ID NO: 2076 - DNA, 2208 bp, Artificial Sequence
  Synthetic Polynucleotide
atggctgccgatggttatcttccagattggctcgaggacactctctctgaaggaataagacagtggtggaagctcaaacctggcccaccaccaccaaagcccgcagagcggcataaggacgacagcaggggtcttgtgcttcctgggtacaagtacctcggacccttcaacggactcgacaagggagagccggtcaacgaggcagacgccgcggccctcgagcacgacaaagcctacgaccggcagctcgacagcggagacaacccgtacctcaagtacaaccacgccgacgcggagtttcaggagcgccttaaagaagatacgtcttttgggggcaacctcggacgagcagtcttccaggcgaaaaagagggttcttgaacctccgggcctggttgaggaacctgttaagacggctccgggaaaaaagaggccggtagagcactctcctgtggagccagactcctcctcgggaaccggaaaggcgggccagcagcctgcaagaaaaagattgaattttggtcagactggagacgcagactcagtacctgacccccagcctctcggacagccaccagcagccccctctggtctgggaactaatacgatggctacaggcagtggcgcaccaatggcagacaataacgagggcgccgacggagtgggtaattcctcgggaaattggcattgcgattccacatggatgggcgacagagtcatcaccaccagcacccgaacctgggccctgcccacctacaacaaccacctctacaaacaaatttccagccaatcaggagcctcgaacgacaatcactactttggctacagcaccccttgggggtattttgacttcaacagattccactgccacttttcaccacgtgactggcaaagactcatcaacaacaactggggattccgacccaagagactcaacttcaagctctttaacattcaagtcaaagaggtcacgcagaatgacggtacgacgacgattgccaataaccttaccagcacggttcaggtgtttactgactcggagtaccagctcccgtacgtcctcggctcggcgcatcaaggatgcctcccgccgttcccagcagacgtcttcatggtgccacagtatggatacctcaccctgaacaacgggagtcaggcagtaggacgctcttcattttactgcctggagtactttccttctcagatgctgcgtaccggaaacaactttaccttcagctacacttttgaggacgttcctttccacagcagctacgctcacagccagagtctggaccgtctcatgaatcctctcatcgaccagtacctgtattacttgagcagaacaaacactccaagtggaaccaccacgcagtcaaggcttcagttttctcaggccggagcgagtgacattcgggaccagtctaggaactggcttcctggaccctgttaccgccagcagcgagtatcaaagacatctgcggataacaacaacagtgaatactcgtggactggagctaccaagtaccacctcaatggcagagactctctggtgaatccgggcccggccatggcaagccacaaggacgatgaagaaaagttttttcctcagagcggggttctcatctttgggaagcaaggctcagagaaaacaaatgtggacattgaaaaggtcatgactacagacgaagaggaaatcaggacaaccaatcccgtggctacggagcagtatggttctgtatctaccaacctccagagaggcaacagacaagcagctaccgcagatgtcaacacacaaggcgttcttccaggcatggtctggcaggacagagatgtgtaccttcaggggcccatctgggcaaagattccacacacggacggacattttcacccctctcccctcatgggtggattcggacttaaacaccctcctccacagattctcatcaagaacaccccggtacctgcgaatccttcgaccaccttcagtgcggcaaagtttgcttccttcatcacacagtactccacgggacaggtcagcgtggagatcgagtgggagctgcagaaggaaaacagcaaacgctggaatcccgaaattcagtacacttccaactacaacaagtctgttaatgtggactttactgtggacactaatggcgtgtattcagagcctcgccccattggcaccagatacctgactcgtaatctgtaa

SEQ ID NO: 2077 - DNA, 2208 bp, Artificial Sequence
  Synthetic Polynucleotide
atggctgccgatggttatcttccagattggctcgaggacactctctctgaaggaataagacagtggtggaagctcaaacctggcccaccaccaccaaagcccgcagagcggcataaggacgacagcaggggtcttgtgcttcctgggtacaagtacctcggacccttcaacggactcgacaagggagagccggtcaacgaggcagacgccgcggccctcgagcacgacaaagcctacgaccggcagctcgacagcggagacaacccgtacctcaagtacaaccacgccgacgcggagtttcaggagcgccttaaagaagatacgtcttttgggggcaacctcggacgagcagtcttccaggcgaaaaagagggttcttgaacctctgggcctggttgaggaacctgttaagacggctccgggaaaaaagaggccggtagagcactctcctgtggagccagactcctcctcgggaaccggaaaggcgggccagcagcctgcaagaaaaagattgaattttggtcagactggagacgcagactcagtacctgacccccagcctctcggacagccaccagcagccccctctggtctgggaactaatacgatggctacaggcagtggcgcaccaatggcagacaataacgagggcgccgacggagtgggtaattcctcgggaaattggcattgcgattccacatggatgggcgacagagtcatcaccaccagcacccgaacctgggccctgcccacctacaacaaccacctctacaaacaaatttccagccaatcaggagcctcgaacgacaatcactactttggctacagcaccccttgggggtattttgacttcaacagattccactgccacttttcaccacgtgactggcaaagactcatcaacaacaactggggattccgacccaagagactcaacttcaagctctttaacattcaagtcaaagaggtcacgcagaatgacggtacgacgacgattgccaataaccttaccagcacggttcaggtgtttactgactcggagtaccagctcccgtacgtcctcggctcggcgcatcaaggatgcctcccgccgttcccagcagacgtcttcatggtgccacagtatggatacctcaccctgaacaacgggagtcaggcagtaggacgctcttcattttactgcctggagtactttccttctcagatgctgcgtaccggaaacaactttaccttcagctacacttttgaggacgttcctttccacagcagctacgctcacagccagagtctggaccgtctcatgaatcctctcatcgaccagtacctgtattacttgagcagaacaaacactccaagtggaaccaccacgcagtcaaggcttcagttttctcaggccggagcgagtgacattcgggaccagtctaggaactggcttcctggaccctgttaccgccagcagcgagtatcaaagacatctgcggataacaacaacagtgaatactcgtggactggagctaccaagtaccacctcaatggcagagactctctggtgaatccgggcccggccatggcaagccacaaggacgatgaagaaaagttttttcctcagagcggggttctcatctttgggaagcaaggctcagagaaaacaaatgtggacattgaaaaggtcatgactacagacgaagaggaaatcaggacaaccaatcccgtggctacggagcagtatggttctgtatctaccaacctccagagaggcaacagacaagcagctaccgcagatgtcaacacacaaggcgttcttccaggcatggtctggcaggacagagatgtgtaccttcaggggcccatctgggcaaagattccacacacggacggacattttcacccctctcccctcatgggtggattcggacttaaacaccctcctccacagattctcatcaagaacaccccggtacctgcgaatccttcgaccaccttcagtgcggcaaagtttgcttccttcatcacacagtactccacgggacaggtcagcgtggagatcgagtgggagctgcagaaggaaaacggcaaacgctggaatcccgaaattcagtacacttccaactacaacaagtctgttaatgtggactttactgtggacactaatggcgtgtattcagagcctcgccccattggcaccagatacctgactcgtaatctgtaa

SEQ ID NO: 2078 - DNA, 2208 bp, Artificial Sequence
  Synthetic Polynucleotide
atggctgccgatggttatcttccagattggctcgaggacactctctctgaaggaataagacagtggtggaagctcaaacctggcccaccaccgccagagcccgcagagcggcacaaggacgacagtaggggtcttgtgcttcctgggtacaagtacctcggacccttcaacggactcgacaaaggagagccggtcaacgaggcagacgccgcggccctcgagcacgacaaggcctacgaccggcagctcgacagcggagacaacccgtacctcaagtacaaccacgccgacgcggagtttcaggagcgtcttaaagaagatacgtcttttgggggcaacctcggacgagcagtattccaggcgaaaaagagggttcttgaacctctgggcctggttgaggagcctgttaagacggctccgggaaaaaagaggccggtagagcactctcctgtggagccagactcctcctcgggaaccggaaaagcgggccagcagcctgcaagaaaaagattgaattttggtcagactggagacgcagactccgtacctgacccccagcctctcggacagccaccagcagcccccacaagtttgggatctactacaatggctacaggcagtggcgcaccaatggcagacaataacgagggtgccgatggagtgggtaattcctcaggaaattggcattgcgattcccaatggctgggcgacagagtcatcaccaccagcacccgaacctgggccctgcccacctacaacaaccacctctacaagcaaatctccagccaatcaggagcatcgaacgacaaccactactttggccacagcaccccttgggggtattttgacttcaacagattccactgtcacttctccccacgtgactggcaaagactcatcaacaacaactggggattccgacccaagagactcaacttcaagctctttaacattcaagtcaaagaggtcacgcagaatgacggtacgacgacgattgccaataaccttaccagcacggttcaggtgtttactgactcggagtaccagctcccgtacgtcctcggctcggcgcatcaaggatgcctcccgccgttcccagcagacgtcttcatggtcccacagtatggatacctcaccctgaacaacgggagtcaggcggtaggacgctcttccttttactgcctggagtactttccttctcagatgcttcgtaccggaaacaactttaccttcagctacacctttgaagacgtgcctttccacagtagctacgctcacagccagagtctggatcggctgatgaatcctcttatcgaccagtacctgtattatctaaacaaaacacaatcaaatagtggaactcttcagcagtctcggctactgtttagtcaagctggacccaccagcatgtctcttcaagctaaaaactggctgcctggaccttgctacagacaacagcgtctgtcaaagcaggcaaacgacaacaacaacagcaactttccctggactgcggctacaaagtatcatctaaatggccgggactcgttggttaatccaggaccagctatggccagccacaaagacgatgaagaaaagtttttccccatgcatggaaccctgatatttggtaaacaaggaacaaatgctaacgacgcggatttggacaatgtcatgattacagatgaagaagaaatccgcaccaccaatcccgtggctacggagcagtacgggactgtgtcaaataatttgcaaaactcaaatactggtccaactactggaactgtcaatcaccaaggagcgttacctggtatggtgtggcaggatcgagacgtgtacctgcagggacccatttgggccaagattcctcacaccgatggacactttcatccttctccactgatgggaggttttggactcaaacacccgcctcctcagatcatgatcaaaaacactcccgttccagccaatcctcctacaaacttcagttctgccaagtttgcttccttcatcacacagtattccacgggacaagtcagcgtggagattgagtgggagctgcagaaggagaacagcaaacgctggaaccccgagatccagtacacttccaactacaacaaatctgttaatgtggactttactgtggacactaatggcgtgtattcagagcctcgccccattggcaccagatacctgactcgtaatctgtaa

SEQ ID NO: 2079 - DNA, 2208 bp, Artificial Sequence
  Synthetic Polynucleotide
atggctgccgatggttatcttccagattggctcgaggacactctctctgaaggaataagacagtggtggaagctcaaacctggcccaccaccgccaaagcccgcagagcggcacaaggacgacagtaggggtcttgtgcttcctgggtacaagtacctcggacccttcaacggactcgacaaaggagagccggtcaacgaggcagacgccgcggccctcgagcacgacaaggcctacgaccggcagctcgacagcggagacaacccgtacctcaagtacaaccacgccgacgcggagtttcaggagcgtcttaaagaagatacgtcttttgggggcaacctcggacgagcagtattccaggcgaaaaagagggttcttgaacctctgggcctggttgaggagcctgttaagacggctccgggaaaaaagaggccggtagagcactctcctgtggagccagactcctcctcgggaaccggaaaagcgggccagcagcctgcaagaaaaagattgaattttggtcagactggagacgcagactccgtacctgacccccagcctctcggacagccaccagcagcccccacaagtttgggatctactacaatggctacaggcagtggcgcaccaatggcagacaataacgagggtgccgatggagtgggtaattcctcaggaaattggcattgcgattcccaatggctgggcgacagagtcatcaccaccagcacccgaacctgggccctgcccacctacaacaaccacctctacaagcaaatctccagccaatcaggagcatcgaacgacaaccactactttggccacagcaccccttgggggtattttgacttcaacagattccactgtcacttctccccacgtgactggcaaagactcatcaacaacaactggggattccgacccaagagactcaacttcaagctctttaacattcaagtcaaagaggtcacgcagaatgacggtacgacgacgattgccaataaccttaccagcacggttcaggtgtttactgactcggagtaccagctcccgtacgtcctcggctcggcgcatcaaggatgcctcccgccgttcccagcagacgtcttcatggtctcacagtatggatacctcaccctgaacaacgggagtcaggcggtaggacgctcttccttttactgcctggagtactttccttctcagatgcttcgtaccggaaacaactttaccttcagctacacctttgaagacgtgcctttccacagtagctacgctcacagccagagtctggatcggctgatgaatcctcttatcgaccagtacctgtattatctaaacaaaacacaatcaaatagtggaactcttcagcagtctcggctactgtttagtcaagctggacccaccagcatgtctcttcaagctaaaaactggctgcctggaccttgctacagacaacagcgtctgtcaaagcaggcaaacgacaacaacaacagcaactttccctggactgcggctacaaagtatcatctaaatggccgggactcgttggttaatccaggaccagctatggccagccacaaagacgatgaagaaaagtttttccccatgcatggaaccctgatatttggtaaacaaggaacaaatgctaacgacgcggatttggacaatgtcatgattacagatgaagaagaaatccgcaccaccaatcccgtggctacggagcagtacgggactgtgtcaaataatttgcaaaactcaaatactggtccaactactggaactgtcaatcaccaaggagcgttacctggtatggtgtggcaggatcgagacgtgtacctgcagggacccatttgggccaagattcctcacaccgatggacactttcatccttctccactgatgggaggttttggactcaaacacccgcctcctcagatcatgatcaaaaacactcccgttccagccaatcctcctacaaacttcagttctgccaagtttgcttccttcatcacacagtattccacgggacaagtcagcgtggagattgagtgggagctgcagaaggagaacagcaaacgctggaaccccgagatccagtacacttccaactacaacaaatctgttaatgtggactttactgtggacactaatggcgtgtattcagagcctcgccccattggcaccagatacctgactcgtaatctgtaa

SEQ ID NO: 2080 - DNA, 2208 bp, Artificial Sequence
  Synthetic Polynucleotide
atggctgccgatggttatcttccagattggctcgaggacactctctctgaaggaataagacagtggtggaagctcaaacctggcccaccaccgccaaagcccgcagagcggcacaaggacgacagtaggggtcttgtgcttcctgggtacaagtacctcggacccttcaacggactcgacaaaggagagccggtcaacgaggcagacgccgcggccctcgagcacgacaaggcctacgaccggcagctcgacagcggagacaacccgtacctcaagtacaaccacgccgacgcggagtttcaggagcgtcttaaagaagatacgtcttttgggggcaacctcggacgagcagtattccaggcgaaaaagagggttcttgaacctctgggcctggttgaggagcctgttaagacggctccgggaaaaaagaggccggtagagcactctcctgtggagccagactcctcctcgggaaccggaaaagcgggccagcagcctgcaagaaaaagattgaattttggtcagactggagacgcagactccgtacctgacccccagcctctcggacagccaccagcagcccccacaagtttgggatctactacaatggctacaggcagtggcgcaccaatggcagacaataacgagggtgccgatggagtgggtaattcctcaggaaattggcattgcgattcccaatggctgggcgacagagtcatcaccaccagcacccgaacctgggccctgcccacctacaacaaccacctctacaagcaaatctccagccaatcaggagcatcgaacgacaaccactactttggccacagcaccccttgggggtattttgacttcaacagattccactgtcacttctccccacgtgactggcaaagactcatcaacaacaactggggattccgacccaagagactcaacttcaagctctttaacattcaagtcaaagaggtcacgcagaatgacggtacgacgacgattgccaataaccttaccagcacggttcaggtgtttactgactcggagtaccagctcccgtacgtcctcggctcggcgcatcaaggatgcctcccgccgttcccagcagacgtcttcatggtctcacagtatggatacctcaccctgaacaacgggagtcaggcggtaggacgctcttccttttactgcctggagtactttccttctcagatgcttcgtaccggaaacaactttaccttcagctacacctttgaagacgtgcctttccacagtagctacgctcacagccagagtctggatcggctgatgaatcctcttatcgaccagtacctgtattatctaaacaaaacacaatcaaatagtggaactcttcagcagtctcggctactgtttagtcaagctggacccaccagcatgtctcttcaagctaaaaactggctgcctggaccttgctacagacaacagcgtctgtcaaagcaggcaaacgacaacaacaacagcaactttccctggactgcggctacaaagtatcatctaaatggccgggactcgttggttaatccaggaccagctatggccagccacaaagacgatgaagaaaagcttttccccatgcatggaaccctgatatttggtaaacaaggaacaaatgctaacgacgcggatttggacaatgtcatgattacagatgaagaagaaatccgcaccaccaatcccgtggctacggagcagtacgggactgtgtcaaataatttgcaaaactcaaatactggtccaactactggaactgtcaatcaccaaggagcgttacctggtatggtgtggcaggatcgagacgtgtacctgcagggacccatttgggccaagattcctcacaccgatggacactttcatccttctccactgatgggaggttttggactcaaacacccgcctcctcagatcatgatcaaaaacactcccgttccagccaatcctcctacaaacttcagttctgccaagtttgcttccttcatcacacagtattccacgggacaagtcagcgtggagattgagtgggagctgcagaaggagaacagcaaacgctggaaccccgagatccagtacacttccaactacaacaaatctgttaatgtggactttactgtggacactaatggcgtgtattcagagcctcgccccattggcaccagatacctgactcgtaatctgtaa

SEQ ID NO: 2081 - DNA, 2208 bp, Artificial Sequence
  Synthetic Polynucleotide
atggctgccgatggttatcttccagattggctcgaggacactctctctgaaggaataagacagtggtggaagctcaaacctggcccaccaccgccaaagcccgcagagcggcacaaggacgacagtaggggtcttgtgcttcctgggtacaagtacctcggacccttcaacggactcgacaaaggagagccggtcaacgaggcagacgccgcggccctcgagcacgacaaggcctacgaccggcagctcgacagcggagacaacccgtacctcaagtacaaccacgccgacgcggagtttcaggagcgtcttaaagaagatacgtcttttgggggcaacctcggacgagcagtattccaggcgaaaaagagggttcttgaacctctgggcctggttgaggagcctgttaagacggctccgggaaaaaagaggccggtagagcactctcctgtggagccagactcctcctcgggaaccggaaaagcgggccagcagcctgcaagaaaaagattgaattttggtcagactggagacgcagactccgtacctgacccccagcctctcggacagccaccagcagcccccacaagtttgggatctactacaatggctacaggcagtggcgcaccaatggcagacaataacgagggtgccgatggagtgggtaattcctcaggaaattggcattgcgattcccaatggctgggcgacagagtcatcaccaccagcacccgaacctgggccctgcccacctacaacaaccacctctacaagcaaatctccagccaatcaggagcatcgaacgacaaccactactttggccacagcaccccttgggggtattttgacttcaacagattccactgtcacttctccccacgtgactggcaaagactcatcaacaacaactggggattccgacccaagagactcaacttcaagctctttaacattcaagtcaaagaggtcacgcagaatgacggtacgacgacgattgccaataaccttaccagcacggttcaggtgtttactgactcggagtaccagctcccgtacgtcctcggctcggcgcatcaaggatgcctcccgccgttcccagcagacgtcttcatggtcccacagtatggatacctcaccctgaacaacgggagtcaggcggtaggacgctcttccttttactgcctggagtactttccttctcagatgcttcgtaccggaaacaactttaccttcagctacacctttgaagacgtgcctttccacagtagctacgctcacagccagagtctggatcggctgatgaatcctcttatcgaccagtacctgtattatctaaacaaaacacaatcaaatagtggaactcttcagcagtctcggctactgtttagtcaagctggacccaccagcatgtctcttcaagctaaaaactggctgcctggaccttgctacagacaacagcgtctgtcaaagcaggcaaacgacaacaacaacagcaacttttcctggactgcggctacaaagtatcatctaaatggccgggactcgttggttaatccaggaccagctatggccagccacaaagacgatgaagaaaagtttttccccatgcatggaaccctgatatttggtaaacaaggaacaaatgctaacgacgcggatttggacaatgtcatgattacagatgaagaagaaatccgcaccaccaatcccgtggctacggagcagtacgggactgtgtcaaataatttgcaaaactcaaatactggtccaactactggaactgtcaatcaccaaggagcgttacctggtatggtgtggcaggatcgagacgtgtacctgcagggacccatttgggccaagattcctcacaccgatggacactttcatccttctccactgatgggaggttttggactcaaacacccgcctcctcagatcatgatcaaaaacactcccgttccagccaatcctcctacaaacttcagttctgccaagtttgcttccttcatcacacagtattccacgggacaagtcagcgtggagattgagtgggagctgcagaaggagaacagcaaacgctggaaccccgagatccagtacacttccaactacaacaaatctgttaatgtggactttactgtggacactaatggcgtgtattcagagcctcgccccattggcaccagatacctgactcgtaatctgtaa

SEQ ID NO: 2082 - DNA, 2208 bp, Artificial Sequence
  Synthetic Polynucleotide
atggctgccgatggttatcttccagattggctcgaggacactctctctgaaggaataagacagtggtggaagctcaaacctggcccaccaccgccaaagcccgcagagcggcacaaggacgacagtaggggtcttgtgcttcctgggtacaagtacctcggacccttcaacggactcgacaaaggagagccggtcaacgaggcagacgccgcggccctcgagcacgacaaggcctacgaccggcagctcgacagcggagacaacccgtacctcaagtacaaccacgccgacgcggagtttcaggagcgtcttaaagaagatacgtcttttgggggcaacctcggacgagcagtattccaggcgaaaaagagggttcttgaacctctgggcctggttgaggagcctgttaagacggctccgggaaaaaagaggccggtagagcactctcctgtggagccagactcctcctcgggaaccggaaaagcgggccagcagcctgcaagaaaaagattgaattttggtcagactggagacgcagactccgtacctgacccccagcctctcggacagccaccagcagcccccacaagtttgggatctactacaatggctacaggcagtggcgcaccaatggcagacaataacgagggtgccgatggagtgggtaattcctcaggaaattggcattgcgattcccaatggctgggcgacagagtcatcaccaccagcacccgaacctgggccctgcccacctacaacaaccacctctacaagcaaatctccagccaatcaggagcatcgaacgacaaccactactttggccacagcaccccttgggggtattttgacttcaacagattccactgtcacttctccccacgtgactggcaaagactcatcaacaacaactggggattccgacccaagagactcaacttcaagctctttaacattcaagtcaaagaggtcacgcagaatgacggtacgacgacgattgccaataaccttaccagcacggttcaggtgtttactgactcggagtaccagctcccgtacgtcctcggctcggcgcatcaaggatgcctcccgccgttcccagcagacgtcttcatggtcccacagtatggatacctcaccctgaacaacgggagtcaggcggtaggacgctcttccttttactgcctggagtactttccttctcagatgcttcgtaccggaaacaactttaccttcagctacacctttgaagacgtgcctttccacagtagctacgctcacagccagagtctggatcggctgatgaatcctcttatcgaccagtacctgtattatctaaacaaaacacaatcaaatagtggaactcttcagcagtctcggctactgtttagtcaagctggacccaccagcatgtctcttcaagctaaaaactggctgcctggaccttgctacagacaacagcgtctgtcaaagcaggcaaacgacaacaacaacagcaactttccctggactgcggctacaaagtatcatctaaatggccgggactcgttggttaatccaggaccagctatggccagccacaaagacgatgaagaaaagtttttccccatgcatggaaccctgatatttggtaaacaaggaacaaatgctaacgacgcggatttggacaatgtcatgattacagatgaagaagaaatccgcaccaccaatcccttggctacggagcagtacgggactgtgtcaaataatttgcaaaactcaaatactggtccaactactggaactgtcaatcaccaaggagcgttacctggtatggtgtggcaggatcgagacgtgtacctgcagggacccatttgggccaagattcctcacaccgatggacactttcatccttctccactgatgggaggttttggactcaaacacccgcctcctcagatcatgatcaaaaacactcccgttccagccaatcctcctacaaacttcagttctgccaagtttgcttccttcatcacacagtattccacgggacaagtcagcgtggagattgagtgggagctgcagaaggagaacagcaaacgctggaaccccgagatccagtacacttccaactacaacaaatctgttaatgtggactttactgtggacactaatggcgtgtattcagagcctcgccccattggcaccagatacctgactcgtaatctgtaa

SEQ ID NO: 2083 - DNA, 2208 bp, Artificial Sequence
  Synthetic Polynucleotide
atggctgccgatggttatcttccagattggctcgaggacactctctctgaaggaataagacagtggtggaagctcaaacctggcccaccaccgccaaagcccgcagagcggcacaaggacgacagtaggggtcttgtgcttcctgggtacaagtacctcggacccttcaacggactcgacaaaggagagccggtcaacgaggcagacgccgcggccctcgagcacgacaaggcctacgaccggcagctcgacagcggagacaacccgtacctcaagtacaaccacgccgacgcggagtttcaggagcgtcttaaagaagatacgtcttttgggggcaacctcggacgagcagtattccaggcgaaaaagagggttcttgaacctctgggcctggttgaggagcctgttaagacggctccgagaaaaaagaggccggtagagcactctcctgtggagccagactcctcctcgggaaccggaaaagcgggccagcagcctgcaagaaaaagattgaattttggtcagactggagacgcagactccgtacctgacccccagcctctcggacagccaccagcagcccccacaagtttgggatctactacaatggctacaggcagtggcgcaccaatggcagacaataacgagggtgccgatggagtgggtaattcctcaggaaattggcattgcgattcccaatggctgggcgacagagtcatcaccaccagcacccgaacctgggccctgcccacctacaacaaccacctctacaagcaaatctccagccaatcaggagcatcgaacgacaaccactactttggccacagcaccccttgggggtattttgacttcaacagattccactgtcacttctccccacgtgactggcaaagactcatcaacaacaactggggattccgacccaagagactcaacttcaagctctttaacattcaagtcaaagaggtcacgcagaatgacggtacgacgacgattgccaataaccttaccagcacggttcaggtgtttactgactcggagtaccagctcccgtacgtcctcggctcggcgcatcaaggatgcctcccgccgttcccagcagacgtcttcatggtcccacagtatggatacctcaccctgaacaacgggagtcaggcggtaggacgctcttccttttactgcctggagtactttccttctcagatgcttcgtaccggaaacaactttaccttcagctacacctttgaagacgtgcctttccacagtagctacgctcacagccagagtctggatcggctgatgaatcctcttatcgaccagtacctgtattatctaaacaaaacacaatcaaatagtggaactcttcagcagtctcggctactgtttagtcaagctggacccaccagcatgtctcttcaagctaaaaactggctgcctggaccttgctacagacaacagcgtctgtcaaagcaggcaaacgacaacaacaacagcaactttccctggactgcggctacaaagtatcatctaaatggccgggactcgttggttaatccaggaccagctatggccagccacaaagacgatgaagaaaagtttttccccatgcatggaaccctgatatttggtaaacaaggaacaaatgctaacgacgcggatttggacaatgtcatgattacagatgaagaagaaatccgcaccaccaatcccgtggctacggagcagtacgggactgtgtcaaataatttgcaaaactcaaatactggtccaactactggaactgtcaatcaccaaggagcgttacctggtatggtgtggcaggatcgagacgtgtacctgcagggacccatttgggccaagattcctcacaccgatggacactttcatccttctccactgatgggaggttttggactcaaacacccgcctcctcagatcatgatcaaaaacactcccgttccagccaatcctcctacaaacttcagttctgccaagtttgcttccttcatcacacagtattccacgggacaagtcagcgtggagattgagtgggagctgcagaaggagaacagcaaacgctggaaccccgagatccagtacacttccaactacaacaaatctgttaatgtggactttactgtggacactaatggcgtgtattcagagcctcgccccattggcaccagatacctgactcgtaatctgtaa

SEQ ID NO: 2084 - DNA, 2208 bp, Artificial Sequence
  Synthetic Polynucleotide
atggctgccgatggttatcttccagattggctcgaggacactctctctgaaggaataagacagtggtggaagctcaaacctggcccaccaccgccaaagcccgcagagcggcacaaggacgacagtaggggtcttgtgcttcctgggtacaagtacctcggacccttcaacggactcgacaaaggagagccggtcaacgaggcagacgccgcggccctcgagcacgacaaggcctacgaccggcagctcgacagcggagacaacccgtacctcaagtacaaccacgccgacgcggagtttcaggagcgtcttaaagaagatacgtcttttgggggcaacctcggacgagcagtattccaggcgaaaaagagggttcttgaacctctgggcctggttgaggagcctgttaagacggctccgggaaaaaagaggccggtagagcactctcctgtggagccagactcctcctcgggaaccggaaaagcgggccagcagcctgcaagaaaaagattgaattttggtcagactggagacgcagactccgtacctgacccccagcctctcggacagccaccagcagcccccacaagtttgggatctactacaatggctacaggcagtggcgcaccaatggcagacaataacgagggtgccgatggagtgggtaattcctcaggaaattggcattgcgattcccaatggctgggcgacagagtcatcaccaccagcacccgaacctgggccctgcccacctacaacaaccacctctacaagcaaatctccagccaatcaggagcatcgaacgacaaccactactttggccacagcaccccttgggggtattttgacttcaacagattccactgtcacttctccccacgtgactggcaaagactcatcaacaacaactggggattccgacccaagagactcaacttcaagctctttaacattcaagtcaaagaggtcacgcagaatgacggtacgacgacgattgccaataaccttaccagcacggttcaggtgtttactgactcggagtaccagctcccgtacgtcctcggctcggcgcatcaaggatgcctcccgccgttcccagcagacgtcttcatggtcccacagtatggatacctcaccctgaacaacgggagtcaggcggtaggacgctcttccttttactgcctggagtactttccttctcagatgcttcgtaccggaaacaactttaccttcagctacacctttgaagacgtgcctttccacagtagctacgctcacagccagagtctggatcggctgatgaatcctcttatcgaccagtacctgtattatctaaacaaaacacaatcaaatagtggaactcttcagcagtctcggctactgtttagtcaagctggacccaccagcatgtctcttcaagctaaaaactggctgcctggaccttgctacagacaacagcgtctgtcaaagcaggcaaacgacaacaacaacagcaactttccctggactgcggctacaaagtatcatctaaatggccgggactcgttggttaatccaggaccagctatggccagccacaaagacgatgaagaaaagtttttccccatgcatggaaccctgatatttggtaaacaaggaacaaatgctaacgacgcggatttggacaatgtcatgattacagatgaagaagaaatccgcaccaccaatcccgtggctacggagcagtacgggactgtgtcaaataatttgcaaaactcaaatactggtccaactactggaactgtcaatcaccaaggagcgttacctggtatggtgtggcaggatcgagacgtgtacctgcagggacccatttgggccaagattcctcacaccgatggacgctttcatccttctccactgatgggaggttttggactcaaacacccgcctcctcagatcatgatcaaaaacactcccgttccagccaatcctcctacaaacttcagttctgccaagtttgcttccttcatcacacagtattccacgggacaagtcagcgtggagattgagtgggagctgcagaaggagaacagcaaacgctggaaccccgagatccagtacacttccaactacaacaaatctgttaatgtggactttactgtggacactaatggcgtgtattcagagcctcgccccattggcaccagatacctgactcgtaatctgtaa

SEQ ID NO: 2085 - DNA, 2208 bp, Artificial Sequence
  Synthetic Polynucleotide
atggctgccgatggttatcttccagattggctcgaggacactctctctgaaggaataagacagtggtggaagctcaaacctggcccaccaccgccaaagcccgcagagcggcacaaggacgacagtaggggtcttgtgcttcctgggtacaagtacctcggacccttcaacggactcgacaaaggagagccggtcaacgaggcagacgccgcggccctcgagcacgacaaggcctacgaccggcagctcgacagcggagacaacccgtacctcaagtacaaccacgccgacgcggagtttcaggagcgtcttaaagaagatacgtcttttgggggcaacctcggacgagcagtattccaggcgaaaaagagggttcttgaacctctgggcctggttgaggagcctgttaagacggctccgggaaaaaagaggccggtagagcactctcctgtggagccagactcctcctcgggaaccggaaaagcgggccagcagcctgcaagaaaaagattgaattttggtcagactggagacgcagactccgtacctgacccccagcctctcggacagccaccagcagcccccacaagtttgggatctactacaatggctacaggcagtggcgcaccaatggcagacaataacgagggtgccgatggagtgggtaattcctcaggaaattggcattgcgattcccaatggctgggcgacagagtcatcaccaccagcacccgaacctgggccctgcccacctacagcaaccacctctacaagcaaatctccagccaatcaggagcatcgaacgacaaccactactttggccacagcaccccttgggggtattttgacttcaacagattccactgtcacttctccccacgtgactggcaaagactcatcaacaacaactggggattccgacccaagagactcaacttcaagctctttaacattcaagtcaaagaggtcacgcagaatgacggtacgacgacgattgccaataaccttaccagcacggttcaggtgtttactgactcggagtaccagctcccgtacgtcctcggctcggcgcatcaaggatgcctcccgccgctcccagcagacgtcttcatggtcccacagtatggatacctcaccctgaacaacgggagtcaggcggtaggacgctcttccttttactgcctggagtactttccttctcagatgcttcgtaccggaaacaactttaccttcagctacacctttgaagacgtgcctttccacagtagctacgctcacagccagagtctggatcggctgatgaatcctcttatcgaccagtacctgtattatctaaacaaaacacaatcaaatagtggaactcttcagcagtctcggctactgtttagtcaagctggacccaccagcatgtctcttcaagctaaaaactggctgcctggaccttgctacagacaacagcgtctgtcaaagcaggcaaacgacaacaacaacagcaactttccctggactgcggctacaaagtatcatctaaatggccgggactcgttggttaatccaggaccagctatggccagccacaaagacgatgaagaaaagtttttccccatgcatggaaccctgatatttggtaaacaaggaacaaatgctaacgacgcggatttggacaatgtcatgattacagatgaagaagaaatccgcaccaccaatcccgtggctacggagcagtacgggactgtgtcaaataatttgcaaaactcaaatactggtccaactactggaactgtcaatcaccaaggagcgttacctggtatggtgtggcaggatcgagacgtgtacctgcagggacccatttgggccaagattcctcacaccgatggacactttcatccttctccactgatgggaggttttggactcaaacacccgcctcctcagatcatgatcaaaaacactcccgttccagccaatcctcctacaaacttcagttctgccaagtttgcttccttcatcacacagtattccacgggacaagtcagcgtggagattgagtgggagctgcagaaggagaacagcaaacgctggaaccccgagatccagtacacttccaactacaacaaatctgttaatgtggactttactgtggacactaatggcgtgtattcagagcctcgccccattggcaccagatacctgactcgtaatctgtaa

SEQ ID NO: 2086 - DNA, 2208 bp, Artificial Sequence
  Synthetic Polynucleotide
atggctgccgatggttatcttccagattggctcgaggacactctctctgaaggaataagacagtggtggaagctcaaacctggcccaccaccgccaaagcccgcagagcggcacaaggacgacagtaggggtcttgtgcttcctgggtacaagtacctcggacccttcaacggactcgacaaaggagagccggtcaacgaggcagacgccgcggccctcgagcacgacaaggcctacgaccggcagctcgacagcggagacaacccgtacctcaagtacaaccacgccgacgcggagtttcaggagcgtcttaaagaagatacgtcttttgggggcaacctcggacgagcagtattccaggcgaaaaagagggttcttgaacctctgggcctggttgaggagcctgttaagacggctccgggaaaaaagaggccggtagagcactctcctgtggagccagactcctcctcgggaaccggaaaagcgggccagcagcctgcaagaaaaagattgaattttggtcagactggaggcgcagactccgtacctgacccccagcctctcggacagccaccagcagcccccacaagtttgggatctactacaatggctacaggcagtggcgcaccaatggcagacaataacgagggtgccgatggagtgggtaattcctcaggaaattggcattgcgattcccaatggctgggcgacagagtcatcaccaccagcacccgaacctgggccctgcccacctacaacaaccacctctacaagcaaatctccagccaatcaggagcatcgaacgacaaccactactttggccacagcaccccttgggggtattttgacttcaacagattccactgtcacttctccccacgtgactggcaaagactcatcaacaacaactggggattccgacccaagagactcaacttcaagctctttaacattcaagtcaaagaggtcacgcagaatgacggtacgacgacgattgccaataaccttaccagcacggttcaggtgtttactgactcggagtaccagctcccgtacgtcctcggctcggcgcatcaaggatgcctcccgccgttcccagcagacgtcttcatggtcccacagtatggatacctcaccctgaacaacgggagtcaggcggtaggacgctcttccttttactgcctggagtactttccttctcagatgcttcgtaccggaaacaactttaccttcagctacacctttgaagacgtgcctttccacagtagctacgctcacagccagagtctggatcggctgatgaatcctcttatcgaccagtacctgtattatctaaacaaaacacaatcaaatagtggaactcttcagcagtctcggctactgtttagtcaagctggacccaccagcatgtctcttcaagctaaaaactggctgcctggaccttgctacagacaacagcgtctgtcaaagcaggcaaacgacaacaacaacagcaactttccctggactgcggctacaaagtatcatctaaatggccgggactcgttggttaatccaggaccagctatggccagccacaaagacgatgaagaaaagtttttccccatgcatggaaccctgatatttggtaaacaaggaacaaatgctaacgacgcggatttggacaatgtcatgattacagatgaagaagaaatccgcaccaccaatcccgtggctacggagcagtacgggactgtgtcaaataatttgcaaaactcaaatactggtccaactactggaactgtcaatcaccaaggagcgttacctggtatggtgtggcaggatcgagacgtgtacctgcagggacccatttgggccaagattcctcacaccgatggacactttcatccttctccactgatgggaggttttggactcaaacacccgcctcctcagatcatgatcaaaaacactcccgttccagccaatcctcctacaaacttcagttctgccaagtttgcttccttcatcacacagtattccacgggacaagtcagcgtggagattgagtgggagctgcagaaggagaacagcaaacgctggaaccccgagatccagtacacttccaactacaacaaatctgttaatgtggactttactgtggacactaatggcgtgtattcagagcctcgccccattggcaccagatacctgactcgtaatctgtaa

SEQ ID NO: 2087 - DNA, 2208 bp, Artificial Sequence
  Synthetic Polynucleotide
atggctgccgatggttatcttccagattggctcgaggacactctctctgaaggaataagacagtggtggaagctcaaacctggcccaccaccgccaaagcccgcagagcggcacaaggacgacagtaggggtcttgtgcttcctgggtacaagtacctcggacccttcaacggactcgacaaaggagagccggtcaacgaggcagacgccgcggccctcgagcacggcaaggcctacgaccggcagctcgacagcggagacaacccgtacctcaagtacaaccacgccgacgcggagtttcaggagcgtcttaaagaagatacgtcttttgggggcaacctcggacgagcagtattccaggcgaaaaagagggttcttgaacctctgggcctggttgaggagcctgttaagacggctccgggaaaaaagaggccggtagagcactctcctgtggagccagactcctcctcgggaaccggaaaagcgggccagcagcctgcaagaaaaagattgaattttggtcagactggagacgcagactccgtacctgacccccagcctctcggacagccaccagcagcccccacaagtttgggatctactacaatggctacaggcagtggcgcaccaatggcagacaataacgagggtgccgatggagtgggtaattcctcaggaaattggcattgcgattcccaatggctgggcgacagagtcatcaccaccagcacccgaacctgggccctgcccacctacaacaaccacctctacaagcaaatctccagccaatcaggagcatcgaacgacaaccactactttggccacagcaccccttgggggtattttgacttcaacagattccactgtcacttctccccacgtgactggcaaagactcatcaacaacaactggggattccgacccaagagactcaacttcaagctctttaacattcaagtcaaagaggtcacgcagaatgacggtacgacgacgattgccaataaccttaccagcacggttcaggtgtttactgactcggagtaccagctcccgtacgtcctcggctcggcgcatcaaggatgcctcccgccgttcccagcagacgtcttcatggtcccacagtatggatacctcaccctgaacaacgggagtcaggcggtaggacgctcttccttttactgcctggagtactttccttctcagatgcttcgtaccggaaacaactttaccttcagctacacctttgaagacgtgcctttccacagtagctacgctcacagccagagtctggatcggctgatgaatcctcttatcgaccagtacctgtattatctaaacaaaacacaatcaaatagtggaactcttcagcagtctcggctactgtttagtcaagctggacccaccagcatgtctcttcaagctaaaaactggctgcctggaccttgctacagacaacagcgtctgtcaaagcaggcaaacgacaacaacaacagcaactttccctggactgcggctacaaagtatcatctaaatggccgggactcgttggttaatccaggaccagctatggccagccacaaagacgatgaagaaaagtttttccccatgcatggaaccctgatatttggtaaacaaggaacaaatgctaacgacgcggatttggacaatgtcatgattacagatgaagaagaaatccgcaccaccaatcccgtggctacggagcagtacgggactgtgtcaaataatttgcaaaactcaaatactggtccaactactggaactgtcaatcaccaaggagcgttacctggtatggtgtggcaggatcgagacgtgtacctgcagggacccatttgggccaagattcctcacaccgatggacactttcatccttctccactgatgggaggttttggactcaaacacccgcctcctcagatcatgatcaaaaacactcccgttccagccaatcctcctacaaacttcagttctgccaagtttgcttccttcatcacacagtattccacgggacaagtcagcgtggagattgagtgggagctgcagaaggagaacagcaaacgctggaaccccgagatccagtacacttccaactacaacaaatctgttaatgtggactttactgtggacactaatggcgtgtattcagagcctcgccccattggcaccagatacctgactcgtaatctgtaa

SEQ ID NO: 2088 - DNA, 2208 bp, Artificial Sequence
  Synthetic Polynucleotide
atggctgccgatggttatcttccagattggctcgaggacactctctctgaaggaataagacagtggtggaagctcaaacctggcccaccaccgccaaagcccgcagagcggcacaaggacgacagtaggggtcttgtgcttcctgggtacaagtacctcggacccttcaacggactcgacaaaggagagccggtcaacgaggcagacgccgcggccctcgagcacgacaaggcctacgaccggcagctcgacagcggagacaacccgtacctcaagtacaaccacgccgacgcggagtttcaggagcgtcttaaagaagatacgtcttttgggggcaacctcggacgagcagtattccaggcgaaaaagagggttcttgaacctctgggcctggttgaggagcctgttaagacggctccgggaaaaaagaggccggtagagcactctcctgtggagccagactcctcctcgggaaccggaaaagcgggccagcagcctgcaagaaaaagattgaattttggtcagactggagacgcagactccgtacctgacccccagcctctcggacagccaccagcagcccccacaagtttgggatctactacaatggctacaggcagtggcgcaccaatggcagacaataacgagggtgccgatggagtgggtaattcctcaggaaattggcattgcgattcccaatggctgggcgacagagtcatcaccaccagcacccgaacctgggccctgcccacctacaacaaccacctctacaagcaaatctccagccaatcaggagcatcgaacgacaaccactactttggccacagcaccccttgggggtattttgacttcaacagattccactgtcacttctccccacgtgaccggcaaagactcatcaacaacaactggggattccgacccaagagactcaacttcaagctctttaacattcaagtcaaagaggtcacgcagaatgacggtacgacgacgattgccaataaccttaccagcacggttcaggtgtttactgactcggagtaccagctcccgtacgtcctcggctcggcgcatcaaggatgcctcccgccgttcccagcagacgtcttcatggtcccacagtatggatacctcaccctgaacaacgggagtcaggcggtaggacgctcttccttttactgcctggagtactttccttctcagatgcttcgtaccggaaacaactttaccttcagctacacctttgaagacgtgcctttccacagtagctacgctcacagccagagtctggatcggctgatgaatcctcttatcgaccagtacctgtattatctaaacaaaacacaatcaaatagtggaactcttcagcagtctcggctactgtttagtcaagctggacccaccagcatgtctcttcaagctaaaaactggctgcctggaccttgctacagacaacagcgtctgtcaaagcaggcaaacgacaacaacaacagcaactttccctggactgcggctacaaagtatcatctaaatggccgggactcgttggttaatccaggaccagctatggccagccacaaagacgatgaagaaaagtttttccccatgcatggaaccctgatatttggtaaacaaggaacaaatgctaacgacgcggatttggacaatgtcatgattacagatgaagaagaaatccgcaccaccaatcccgtggctacggagcagtacgggactgtgtcaaataatttgcaaaactcaaatactggtccaactactggaactgtcaatcaccaaggagcgttacctggtatggtgtggcaggatcgagacgtgtacctgcagggacccatttgggccaagattcctcacaccgatggacactttcatccttctccactgatgggaggttttggactcaaacacccgcctcctcagatcatgatcaaaaacactcccgttccagccaatcctcctacaaacttcagttctgccaagtttgcttccttcatcacacagtattccacgggacaagtcagcgtggagattgagtgggagctgcagaaggagaacagcaaacgctggaaccccgagatccagtacacttccaactacaacaaatctgttaatgtggactttactgtggacactaatggcgtgtattcagagcctcgccccattggcaccagatacctgactcgtaatctgtaa

SEQ ID NO: 2089 - DNA, 2208 bp, Artificial Sequence
  Synthetic Polynucleotide
atggctgccgatggttatcttccagattggctcgaggacactctctctgaaggaataagacagtggtggaagctcaaacctggcccaccaccgccaaagcccgcagagcggcacaaggacgacagtaggggtcttgtgcttcctgggtacaagtacctcggacccttcaacggactcgacaaaggagagccggtcaacgaggcagacgccgcggccctcgagcacgacaaggcctacgaccggcagctcgacagcggagacaacccgtacctcaagtacaaccacgccgacgcggagtttcaggagcgtcttaaagaagatacgtcttttgggggcaacctcggacgagcagtattccaggcgaaaaagagggttcttgaacctctgggcctggttgaggagcctgttaagacggctccgggaaaaaagaggccggtagagcactctcctgtggagccagactcctcctcgggaaccggaaaagcgggccagcagcctgcaagaaaaagattgaattttggtcagactggagacgcagactccgtacctgacccccagcctctcggacagccaccagcagcccccacaagtttgggatctactacaatggctacaggcagtggcgcaccaatggcagacaataacgagggtgccgatggagtgggtaattcctcaggaaattggcattgcgattcccaatggctgggcgacagagtcatcaccaccagcacccgaacctgggccctgcccacctacaacaaccacctctacaagcaaatctccagccaatcaggagcatcgaacgacaaccactactttggccacagcaccccttgggggtattttgacttcaacagattccactgtcacttctccccacgtgactggcaaagactcatcaacaacaactggggattccgacccaagagacccaacttcaagctctttaacattcaagtcaaagaggtcacgcagaatgacggtacgacgacgattgccaataaccttaccagcacggttcaggtgtttactgactcggagtaccagctcccgtacgtcctcggctcggcgcatcaaggatgcctcccgccgttcccagcagacgtcttcatggtcccacagtatggatacctcaccctgaacaacgggagtcaggcggtaggacgctcttccttttactgcctggagtactttccttctcagatgcttcgtaccggaaacaactttaccttcagctacacctttgaagacgtgcctttccacagtagctacgctcacagccagagtctggatcggctgatgaatcctcttatcgaccagtacctgtattatctaaacaaaacacaatcaaatagtggaactcttcagcagtctcggctactgtttagtcaagctggacccaccagcatgtctcttcaagctaaaaactggctgcctggaccttgctacagacaacagcgtctgtcaaagcaggcaaacgacaacaacaacagcaactttccctggactgcggctacaaagtatcatctaaatggccgggactcgttggttaatccaggaccagctatggccagccacaaagacgatgaagaaaagtttttccccatgcatggaaccctgatatttggtaaacaaggaacaaatgctaacgacgcggatttggacaatgtcatgattacagatgaagaagaaatccgcaccaccaatcccgtggctacggagcagtacgggactgtgtcaaataatttgcaaaactcaaatactggtccaactactggaactgtcaatcaccaaggagcgttacctggtatggtgtggcaggatcgagacgtgtacctgcagggacccatttgggccaagattcctcacaccgatggacactttcatccttctccactgatgggaggttttggactcaaacacccgcctcctcagatcatgatcaaaaacactcccgttccagccaatcctcctacaaacttcagttctgccaagtttgcttccttcatcacacagtattccacgggacaagtcagcgtggagattgagtgggagctgcagaaggagaacagcaaacgctggaaccccgagatccagtacacttccaactacaacaaatctgttaatgtggactttactgtggacactaatggcgtgtattcagagcctcgccccattggcaccagatacctgactcgtaatctgtaa

SEQ ID NO: 2090 - DNA, 2208 bp, Artificial Sequence
  Synthetic Polynucleotide
atggctgccgatggttatcttccagattggctcgaggacactctctctgaaggaataagacagtggtggaagctcaaacctggcccaccaccgccaaagcccgcagagcggcacaaggacgacagtaggggtcttgtgcttcctgggtacaagtacctcggacccttcaacggactcgacaaaggagagccggtcaacgaggcagacgccgcggccctcgagcacgacaaggcctacgaccggcagctcgacagcggagacaacccgtacctcaagtacaaccacgccgacgcggagtttcaggagcgtcttaaagaagatacgtcttttgggggcaacctcggacgagcagtattccaggcgaaaaagagggttcttgaacctctgggcctggttgaggagcctgttaagacggctccgggaaaaaagaggccggtagagcactctcctgtggagccagactcctcctcgggaaccggaaaagcgggccagcagcctgcaagaaaaagattgaattttggtcagactggagacgcagactccgtacctgacccccagcctctcggacagccaccagcagcccccacaagtttgggatctactacaatggctacaggcagtggcgcaccaatggcagacaataacgagggtgccgatggagtgggtaattcctcaggaaattggcattgcgattcccaatggctgggcgacagagtcatcaccaccagcacccgaacctgggccctgcccacctacaacaaccacctctacaagcaaatctccagccaatcaggagcatcgaacgacaaccactactttggccacagcaccccttgggggtattttgacttcaacagattccactgtcacttctccccacgtgactggcaaagactcatcaacaacaactggggattccgacccaagagactcaacttcaagctctttaacattcaagtcaaagaggtcacgcagaatgacggtacgacgacgattgccaataaccttaccagcacggttcaggtgtttactgactcggagtaccagctcccgtacgtcctcggctcggcgcatcaaggatgcctcccgccgttcccagcagacgtcttcatggtcccacagtatggatacctcaccctgaacaacgggagtcaggcggtaggacgctcttccttttactgcctggagtactttccttctcagatgcttcgtaccggaaacaactttaccttcagctacacctttgaagacgtgcctttccacagtagctacgctcacagccagagtctggatcggctgatgaatcctcttatcgaccagtacctgtattatctaaacaaaacacaatcaaatagtggaactcttcagcagtctcggctactgtttagtcaagctggacccaccagcatgtctcttcaagctaaaaactggctgcctggaccttgctacagacaacagcgtctgtcaaagcaggcaaacgacaacaacaacagcaactttccctggactgcggctacaaagtatcatctaaatggccgggactcgttggttaatccaggaccagctatggccagccacaaagacgatgaagaaaagtttttccccatgcatggaaccctgatatttggtaaacaaggaacaaatgctaacgacgcggatttggacaatgtcatgattacagatgaagaagaaatccgcaccaccaatcccgtggctacggagcagtacgggactgtgtcaaataatttgcaaaactcaaatactggtccaactactggaactgtcaatcaccaaggagcgttacctggtatggtgtggcaggatcgagacgtgtacctgcagggacccatttgggccaagattcctcacaccgatggacactttcatccttctccactgatgggaggttttggactcaaacacccgcctcctcagatcatgatcaaaaacactcccgttccagccaatcctcctacaaacttcagttctgccaagtttgcttccttcatcacacagtattccacgggacaagtcagcgtggagattgagtgggagctgcagaaggagaacagcaaacgctggaaccccgagatccagtacacttccaactacaacaaatctgttaatgtggactttactgtgggcactaatggcgtgtattcagagcctcgccccattggcaccagatacctgactcgtaatctgtaa

SEQ ID NO: 2091 - DNA, 2208 bp, Artificial Sequence
  Synthetic Polynucleotide
atggctgccgatggttatcttccagattggctcgaggacactctctctgaaggaataagacagtggtggaagctcaaacctggcccaccaccgccaaagcccgcagagcggcacaaggacgacagtaggggtcttgtgcttcctgggtacaagtacctcggacccttcaacggactcgacaaaggagagccggtcaacgaggcagacgccgcggccctcgagcacgacaaggcctacgaccggcagctcgacagcggagacaacccgtacctcaagtacaaccacgccgacgcggagtttcaggagcgtcttaaagaagatacgtcttttgggggcaacctcggacgagcagtattccaggcgaaaaagagggttcttgaacctctgggcctggttgaggagcctgttaagacggctccgggaaaaaagaggccggtagagcactctcctgtggagccagactcctcctcgggaaccggaaaagcgggccagcagcctgcaagaaaaagattgaattttggtcagactggagacgcagactccgtacctgacccccagcctctcggacagccaccagcagcccccacaagtttgggatctactacaatggctacaggcagtggcgcaccaatggcagacaataacgagggtgccgatggagtgggtaattcctcaggaaattggcattgcgattcccaatggctgggcgacagagtcatcaccaccagcacccgaacctgggccctgcccacctacaacaaccacctctacaagcaaatctccagccaatcaggagcatcgaacgacaaccactactttggccacagcaccccttgggggtattttgacttcaacagattccactgtcacttctccccacgtgactggcaaagactcatcaacaacaactggggattccgacccaagagactcaacttcaagctctttaacattcaagtcaaagaggtcacgcagaatgacggtacgacgacgattgccaataaccttaccagcacggttcaggtgtttactgactcggagtaccagctcccgtacgtcctcggctcggcgcatcaaggatgcctcccgccgttcccagcagacgtcttcatggtcccacagtatggatacctcaccctgaacaacgggagtcaggcggtaggacgctcttccttttactgcctggagtactttccttctcagatgcttcgtaccggaaacaactttaccttcagctacacctttgaagacgtgcctttccacagtagctacgctcacagccagagtctggatcggctgatgaatcctcttatcgaccagtacctgtattatctaaacaaaacacaatcaaatagtggaactcttcagcagtctcggctactgtttagtcaagctggacccaccagcacgtctcttcaagctaaaaactggctgcctggaccttgctacagacaacagcgtctgtcaaagcaggcaaacgacaacaacaacagcaactttccctggactgcggctacaaagtatcatctaaatggccgggactcgttggttaatccaggaccagctatggccagccacaaagacgatgaagaaaagtttttccccatgcatggaaccctgatatttggtaaacaaggaacaaatgctaacgacgcggatttggacaatgtcatgattacagatgaagaagaaatccgcaccaccaatcccgtggctacggagcagtacgggactgtgtcaaataatttgcaaaactcaaatactggtccaactactggaactgtcaatcaccaaggagcgttacctggtatggtgtggcaggatcgagacgtgtacctgcagggacccatttgggccaagattcctcacaccgatggacactttcatccttctccactgatgggaggttttggactcaaacacccgcctcctcagatcatgatcaaaaacactcccgttccagccaatcctcctacaaacttcagttctgccaagtttgcttccttcatcacacagtattccacgggacaagtcagcgtggagattgagtgggagctgcagaaggagaacagcaaacgctggaaccccgagatccagtacacttccaactacaacaaatctgttaatgtggactttactgtggacactaatggcgtgtattcagagcctcgccccattggcaccagatacctgactcgtaatctgtaa

SEQ ID NO: 2092 - DNA, 2208 bp, Artificial Sequence
  Synthetic Polynucleotide
atggctgccgatggttatcttccagattggctcgaggacactctctctgaaggaataagacagtggtggaagctcaaacctggcccaccaccgccaaagcccgcagagcggcacaaggacgacagtaggggtcttgtgcttcctgggtacaagtacctcggacccttcaacggactcgacaaaggagagccggtcaacgaggcagacgccgcggccctcgagcacgacaaggcctacgaccggcagctcgacagcggagacaacccgtacctcaagtacaaccacgccgacgcggagtttcaggagcgtcttaaagaagatacgtcttttgggggcaacctcggacgagcagtattccaggcgaaaaagagggttcttgaacctctgggcctggttgaggagcctgttaagacggctccgggaaaaaagaggccggtagagcactctcctgtggagccagactcctcctcgggaaccggaaaagcgggccagcagcctgcaagaaaaagattgaattttggtcagactggagacgcagactccgtacctgacccccagcctctcggacagccaccagcagcccccacaagtttgggatctactacaatggctacaggcagtggcgcaccaatggcagacaataacgagggtgccgatggagtgggtaattcctcaggaaattggcattgcgattcccaatggctgggcgacagagtcatcaccaccagcacccgaacctgggccctgcccacctacaacaaccacctctacaagcaaatctccagccaatcaggagcatcgaacgacaaccactactttggccacagcaccccttgggggtattttgacttcaacagattccactgtcacttctccccacgtgactggcaaagactcatcaacaacaactggggattccgacccaagagactcaacttcaagctctttaacattcaagtcaaagaggtcacgcagaatgacggtacgacgacgattgccaataaccttaccagcacggttcaggtgtttactgactcggagtaccagctcccgtacgtcctcggctcggcgcatcaaggatgcctcccgccgttcccagcagacgtcttcatggtcccacagtatggatacctcaccctgaacaacgggagtcaggcggtaggacgctcttccttttactgcctggagtactttccttctcagatgcttcgtaccggaaacaactttaccttcagctacacctttgaagacgtgcctttccacagtagctacgctcacagccagagtctggatcggctgatgaatcctcttatcgaccagtacctgtattatctaaacaaaacacaatcaaatagtggaactcttcagcagtctcggctactgtttagtcaagctggacccaccagcatgtctcttcaagctaaaaactggctgcctggaccttgctacagacaacagcgtctgtcaaagcaggcaaacgacaacaacaacagcaactttccctggactgcggctacaaagtatcatctaaatggccgggactcgttggttaatccaggaccagctatggccagccacaaagacgatgaagaaaagtttttccccatgcatggaaccctgatatttggtaaacaaggaacaaatgctaacgacgcggatttggacaatgtcatgattacagatgaagaagaaatccgcaccaccaatcccgtggctacggagcagtacgggactgtgtcaaataatttgcaaaactcaaatactggtccaactactggaactatcaatcaccaaggagcgttacctggtatggtgtggcaggatcgagacgtgtacctgcagggacccatttgggccaagattcctcacaccgatggacactttcatccttctccactgatgggaggttttggactcaaacacccgcctcctcagatcatgatcaaaaacactcccgttccagccaatcctcctacaaacttcagttctgccaagtttgcttccttcatcacacagtattccacgggacaagtcagcgtggagattgagtgggagctgcagaaggagaacagcaaacgctggaaccccgagatccagtacacttccaactacaacaaatctgttaatgtggactttactgtggacactaatggcgtgtattcagagcctcgccccattggcaccagatacctgactcgtaatctgtaa

SEQ ID NO: 2093 - DNA, 2208 bp, Artificial Sequence
  Synthetic Polynucleotide
atggctgccgatggttatcttccagattggctcgaggacactctctctgaaggaataagacagtggtggaagctcaaacctggcccaccaccgccaaagcccgcagagcggcacaaggacgacagtaggggtcttgtgcttcctgggtacaagtacctcggacccttcaacggactcgacaaaggagagccggtcaacgaggcagacgccgcggccctcgagcacgacaaggcctacgaccggcagctcgacagcggagacaacccgtacctcaagtacaaccacgccgacgcggagtttcaggagcgtcttaaagaagatacgtcttttgggggcaacctcggacgagcagtattccaggcgaaaaagagggttcttgaacctctgggcctggttgaggagcctgttaagacggctccgggaaaaaagaggccggtagagcactctcctgtggagccagactcctcctcgggaaccggaaaagcgggccagcagcctgcaagaaaaagattgaattttggtcagactggagacgcagactccgtacctgacccccagcctctcggacagccaccagcagcccccacaagtttgggatctactacaatggctacaggcagtggcgcaccaatggcagacaataacgagggtgccgatggagtgggtaattcctcaggaaattggcattgcgattcccaatggctgggcgacagagtcatcaccaccagcacccgaacctgggccctgcccacctacaacaaccacctctacaagcaaatctccagccaatcaggagcatcgaacgacaaccactactttggccacagcaccccttgggggtattttgacttcaacagattccactgtcacttctccccacgtgactggcaaagactcatcaacaacaactggggattccgacccaagagactcaacttcaagctctttaacattcaagtcaaagaggtcacgcagaatgacggtacggcgacgattgccaataaccttaccagcacggttcaggtgtttactgactcggagtaccagctcccgtacgtcctcggctcggcgcatcaaggatgcctcccgccgttcccagcagacgtcttcatggtcccacagtatggatacctcaccctgaacaacgggagtcaggcggtaggacgctcttccttttactgcctggagtactttccttctcagatgcttcgtaccggaaacaactttaccttcagctacacctttgaagacgtgcctttccacagtagctacgctcacagccagagtctggatcggctgatgaatcctcttatcgaccagtacctgtattatctaaacaaaacacaatcaaatagtggaactcttcagcagtctcggctactgtttagtcaagctggacccaccagcatgtctcttcaagctaaaaactggctgcctggaccttgctacagacaacagcgtctgtcaaagcaggcaaacgacaacaacaacagcaactttccctggactgcggctacaaagtatcatctaaatggccgggactcgttggttaatccaggaccagctatggccagccacaaagacgatgaagaaaagtttttccccatgcatggaaccctgatatttggtaaacaaggaacaaatgctaacgacgcggatttggacaatgtcatgattacagatgaagaagaaatccgcaccaccaatcccgtggctacggagcagtacgggactgtgtcaaataatttgcaaaactcaaatactggtccaactactggaactgtcaatcaccaaggagcgttacctggtatggtgtggcaggatcgagacgtgtacctgcagggacccatttgggccaagattcctcacaccgatggacactttcatccttctccactgatgggaggttttggactcaaacacccgcctcctcagatcatgatcaaaaacactcccgttccagccaatcctcctacaaacttcagttctgccaagtttgcttccttcatcacacagtattccacgggacaagtcagcgtggagattgagtgggagctgcagaaggagaacagcaaacgctggaaccccgagatccagtacacttccaactacaacaaatctgttaatgtggactttactgtggacactaatggcgtgtattcagagcctcgccccattggcaccagatacctgactcgtaatctgtaa

SEQ ID NO: 2094 - DNA, 2208 bp, Artificial Sequence
  Synthetic Polynucleotide
atggctgccgatggttatcttccagattggctcgaggacactctctctgaaggaataagacagtggtggaagctcaaacctggcccaccaccgccaaagcccgcagagcggcacaaggacgacagtaggggtcttgtgcttcctgggtacaagtacctcggacccttcaacggactcgacaaaggagagccggtcaacgaggcagacgccgcggccctcgagcacgacaaggcctacgaccggcagctcgacagcggagacaacccgtacctcaagtacaaccacgccgacgcggagtttcaggagcgtcttaaagaagatacgtcttttgggggcaacctcggacgagcagtattccaggcgaaaaagagggttcttgaacctctgggcctggttgaggagcctgttaagacggctccgggaaaaaagaggccggtagagcactctcctgtggagccagactcctcctcgggaaccggaaaagcgggccagcagcctgcaagaaaaagattgaattttggtcagactggagacgcagactccgtacctgacccccagcctctcggacagccaccagcagcccccacaagtttgggatctactacaatggctacaggcagtggcgcaccaatggcagacaataacgagggtgccgatggagtgggtaattcctcaggaaattggcattgcgattcccaatggctgggcgacagagtcatcaccaccagcacccgaacctgggccctgcccacctacaacaaccacctctacaagcaaatctccagccaatcaggagcatcgaacgacaaccactactttggccacagcaccccttgggggtattttgacttcaacagattccactgtcacttctccccacgtgactggcaaagactcatcaacaacaactggggattccgacccaagagactcaacttcaagctctttaacattcaagtcaaagaggtcacgcagaatgacggtacgacgacgattgccaataaccttaccagcacggttcaggtgtttactgactcggagtaccagctcccgtacgtcctcggctcggcgcatcaaggatgcctcccgccgttcccagcagacgtcttcatggtcccacagtatggatacctcaccctgaacaacgggagtcaggcggtaggacgctcttccttttactgcctggagtactttccttctcagatgcttcgtaccggaaacaactttaccttcagctacacctttgaagacgtgcctttccacagtagctacgctcacagccagagtctggatcggctgatgaatcctcttatcgaccagtacctgtattatctaaacaaaacacaatcaaatagtggaactcttcagcagtctcggctactgtttagtcaagctggacccaccagcatgtctcttcaagctaaaaactggctgcctggaccttgctacagacaacagcgtctgtcaaagcaggcaaacgacaacaacaacagcaactttccctggactgtggctacaaagtatcatctaaatggccgggactcgttggttaatccaggaccagctatggccagccacaaagacgatgaagaaaagtttttccccatgcatggaaccctgatatttggtaaacaaggaacaaatgctaacgacgcggatttggacaatgtcatgattacagatgaagaagaaatccgcaccaccaatcccgtggctacggagcagtacgggactgtgtcaaataatttgcaaaactcaaatactggtccaactactggaactgtcaatcaccaaggagcgttacctggtatggtgtggcaggatcgagacgtgtacctgcagggacccatttgggccaagattcctcacaccgatggacactttcatccttctccactgatgggaggttttggactcaaacacccgcctcctcagatcatgatcaaaaacactcccgttccagccaatcctcctacaaacttcagttctgccaagtttgcttccttcatcacacagtattccacgggacaagtcagcgtggagattgagtgggagctgcagaaggagaacagcaaacgctggaaccccgagatccagtacacttccaactacaacaaatctgttaatgtggactttactgtggacactaatggcgtgtattcagagcctcgccccattggcaccagatacctgactcgtaatctgtaa

SEQ ID NO: 2095 - DNA, 2208 bp, Artificial Sequence
  Synthetic Polynucleotide
atggctgccgatggttatcttccagattggctcgaggacactctctctgaaggaataagacagtggtggaagctcaaacctggcccaccaccgccaaagcccgcagagcggcacaaggacgacagtaggggtcttgtgcttcctgggtacaagtacctcggacccttcaacggactcgacaaaggagagccggtcaacgaggcagacgccgcggccctcgagcacgacaaggcctacgaccggcagctcgacagcggagacaacccgtacctcaagtacaaccacgccgacgcggagtttcaggagcgtcttaaagaagatacgtcttttgggggcaacctcggacgagcagtattccaggcgaaaaagagggttcttgaacctctgggcctggttgaggagcctgttaagacggctccgggaaaaaagaggccggtagagcactctcctgtggagccagactcctcctcgggaaccggaaaagcgggccagcagcctgcaagaaaaagattgaattttggtcagactggagacgcagactccgtacctgacccccagcctctcggacagccaccagcagcccccacaagtttgggatctactacaatggctacaggcagtggcgcaccaatggcagacaataacgagggtgccgatggagtgggtaattcctcaggaaattggcattgcgattcccaatggctgggcgacagagtcatcaccaccagcacccgaacctgggccctgcccacctacaacaaccacctctacaagcaaatctccagccaatcaggagcatcgaacgacaaccactactttggccacagcaccccttgggggtattttgacttcaacagattccactgtcacttctccccacgtgactggcaaagactcatcaacaacaactggggattccgacccaagagactcaacttcaagctctttaacattcaagtcaaagaggtcacgcagaatgacggtacgacgacgattgccaataaccttaccagcacggttcaggtgtttactgactcggagtaccagctcccgtacgtcctcggctcggcgcatcaaggatgcctcccgccgttcccagcagacgtcttcatggtcccacagtatggatacctcaccctgaacaacgggagtcaggcggtaggacgctcttccttttactgcctggagtactttccttctcagatgcttcgtaccggaaacaactttaccttcagctacacctttgaagacgtgcctttccacagtagctacgctcacagccagagtctggatcggctgatgaatcctcttatcgaccagtacctgtattatctaaacaaaacacaatcaaatagtggaactcttcagcagtctcggctactgtttagtcaagctggacccaccagcatgtctcttcaagctaaaaactggctgcctggaccttgctacagacaacagcgtctgtcaaagcaggcaaacgacaacaacaacagcaactttccctggactgcggctacaaagtatcatctaaatggccgggactcgttggttaatccaggaccagctatggccagccacaaagacgatgaagaaaagtttttccccatgcatggaaccctgatatttggtaaacaaggaacaaatgctaacgacgcggatttggacaatgtcatgattacagatgaagaagaaatccgcaccaccaatcccgtggctacggagcagtacgggactgtgtcaaataatttgcaaaactcaaatactggtccaactactggaactgtcaatcaccaaggagcgttacctggtatggtgtggcaggatcgagacgtgtacctgcagggacccatttgggccaagattcctcacaccgatggacactttcatccttctccactgatgggaggttttggactcaaacacccgcctcctcagatcatgatcaaaaacactcccgttccagccaatcctcctacaaacttcagttctgccaagtttgcttccttcatcacacagcattccacgggacaagtcagcgtggagattgagtgggagctgcagaaggagaacagcaaacgctggaaccccgagatccagtacacttccaactacaacaaatctgttaatgtggactttactgtggacactaatggcgtgtattcagagcctcgccccattggcaccagatacctgactcgtaatctgtaa

SEQ ID NO: 2096 - DNA, 2208 bp, Artificial Sequence
  Synthetic Polynucleotide
atggctgccgatggttatcttccagattggctcgaggacactctctctgaaggaataagacagtggtggaagctcaaacctggcccaccaccgccaaagcccgcagagcggcacaaggacgacggtaggggtcttgtgcttcctgggtacaagtacctcggacccttcaacggactcgacaaaggagagccggtcaacgaggcagacgccgcggccctcgagcacgacaaggcctacgaccggcagctcgacagcggagacaacccgtacctcaagtacaaccacgccgacgcggagtttcaggagcgtcttaaagaagatacgtcttttgggggcaacctcggacgagcagtattccaggcgaaaaagagggttcttgaacctctgggcctggttgaggagcctgttaagacggctccgggaaaaaagaggccggtagagcactctcctgtggagccagactcctcctcgggaaccggaaaagcgggccagcagcctgcaagaaaaagattgaattttggtcagactggagacgcagactccgtacctgacccccagcctctcggacagccaccagcagcccccacaagtttgggatctactacaatggctacaggcagtggcgcaccaatggcagacaataacgagggtgccgatggagtgggtaattcctcaggaaattggcattgcgattcccaatggctgggcgacagagtcatcaccaccagcacccgaacctgggccctgcccacctacaacaaccacctctacaagcaaatctccagccaatcaggagcatcgaacgacaaccactactttggctacagcaccccttgggggtattttgacttcaacagattccactgtcacttctccccacgtgactggcaaagactcatcaacaacaactggggattccgacccaagagactcaacttcaagctctttaacattcaagtcaaagaggtcacgcagaatgacggtacgacgacgattgccaataaccttaccagcacggttcaggtgtttactgactcggagtaccagctcccgtacgtcctcggctcggcgcatcaaggatgcctcccgccgttcccagcagacgtcttcatggtcccacagtatggatacctcaccctgaacaacgggagtcaggcggtaggacgctcttccttttactgcctggagtactttccttctcagatgcttcgtaccggaaacaactttaccttcagctacacctttgaagacgtgcctttccacagtagctacgctcacagccagagtctggatcggctgatgaatcctcttatcgaccagtacctgtattatctaaacaaaacacaatcaaatagtggaactcttcagcagtctcggctactgtttagtcaagctggacccaccagcatgtctcttcaagctaaaaactggctgcctggaccttgctacagacaacagcgtctgtcaaagcaggcaaacgacaacaacaacagcaactttccctggactgcggctacaaagtatcatctaaatggccgggactcgttggttaatccaggaccagctatggccagccacaaagacgatgaagaaaagtttttccccatgcatggaaccctgatatttggtaaacaaggaacaaatgctaacgacgcggatttggacaatgtcatgattacagatgaagaagaaatccgcaccaccaatcccgtggctacggagcagtacgggactgtgtcaaataatttgcaaaactcaaatactggtccaactactggaactgtcaatcaccaaggagcgttacctggtatggtgtggcaggatcgagacgtgtacctgcagggacccatttgggccaagattcctcacaccgatggacactttcatccttctccactgatgggaggttttggactcaaacacccgcctcctcagatcatgatcaaaaacactcccgttccagccaatcctcctacaaacttcagttctgccaagtttgcttccttcatcacacagtattccacaggacaagtcagcgtggagattgagtgggagctgcagaaggagaacagcaaacgctggaaccccgagatccagtacacttccaactacaacaaatctgttaatgtggactttactgtggacactaatggcgtgtattcagagcctcgccccattggcaccagatacctgactcgtaatctgtaa

SEQ ID NO: 2097 - DNA, 2208 bp, Artificial Sequence
  Synthetic Polynucleotide
atggctgccgatggttatcttccagattggctcgaggacactctctctgaaggaataagacagtggtggaagctcaaacctggcccaccaccgccaaagcccgcagagcggcacaaggacgacagtaggggtcttgtgcttcctgggtacaagtacctcggacccttcaacggactcgacaaaggagagccggtcaacgaggcagacgccgcggccctcgagcacgacaaggcctacgaccggcagctcgacagcggagacaacccgtacctcaagtacaaccacgccgacgcggagcttcaggagcgtcttaaagaagatacgtcttttgggggcaacctcggacgagcagtattccaggcgaaaaagagggttcttgaacctctgggcctggttgaggagcctgttaagacggctccgggaaaaaagaggccggtagagcactctcctgtggagccagactcctcctcgggaaccggaaaagcgggccagcagcctgcaagaaaaagattgaattttggtcagactggagacgcagactccgtacctgacccccagcctctcggacagccaccagcagcccccacaagtttgggatctactacaatggctacaggcagtggcgcaccaatggcagacaataacgagggtgccgatggagtgggtaattcctcaggaaattggcattgcgattcccaatggctgggcgacagagtcatcaccaccagcacccgaacctgggccctgcccacctacaacaaccacctctacaagcaaatctccagccaatcaggagcatcgaacgacaaccactactttggctacagcaccccttgggggtattttgacttcaacagattccactgtcacttctccccacgtgactggcaaagactcatcaacaacaactggggattccgacccaagagactcaacttcaagctctttaacattcaagtcaaagaggtcacgcagaatgacggtacgacgacgattgccaataaccttaccagcacggttcaggtgtttactgactcggagtaccagctcccgtacgtcctcggctcggcgcatcaaggatgcctcccgccgttcccagcagacgtcttcatggtcccacagtatggatacctcaccctgaacaacgggagtcaggcggtaggacgctcttccttttactgcctggagtactttccttctcagatgcttcgtaccggaaacaactttaccttcagctacacctttgaagacgtgcctttccacagtagctacgctcacagccagagtctggatcggctgatgaatcctcttatcgaccagtacctgtattatctaaacaaaacacaatcaaatagtggaactcttcagcagtctcggctactgtttagtcaagctggacccaccagcatgtctcttcaagctaaaaactggctgcctggaccttgctacagacaacagcgtctgtcaaagcaggcaaacgacaacaacaacagcaactttccctggactgcggctacaaagtatcatctaaatggccgggactcgttggttaatccaggaccagctatggccagccacaaagacgatgaagaaaagtttttccccatgcatggaaccctgatatttggtaaacaaggaacaaatgctaacgacgcggatttggacaatgtcatgattacagatgaagaagaaatccgcaccaccaatcccgtggctacggagcagtacgggactgtgtcaaataatttgcaaaactcaaatactggtccaactactggaactgtcaatcaccaaggagcgttacctggtatggtgtggcaggatcgagacgtgtacctgcagggacccatttgggccaagattcctcacaccgatggacactttcatccttctccactgatgggaggttttggactcaaacacccgcctcctcagatcatgatcaaaaacactcccgttccagccaatcctcctacaaacttcagttctgccaagtttgcttccttcatcacacagtattccacaggacaagtcagcgtggagattgagtgggagctgcagaaggagaacagcaaacgctggaaccccgagatccagtacacttccaactacaacaaatctgttaatgtggactttactgtggacactaatggcgtgtattcagagcctcgccccattggcaccagatacctgactcgtaatctgtaa

SEQ ID NO: 2098 - DNA, 2208 bp, Artificial Sequence
  Synthetic Polynucleotide
atggctgccgatggttatcttccagattggctcgaggacactctctctgaaggaataagacagtggtggaagctcaaacctggcccaccaccgccaaagcccgcagagcggcacaaggacgacagtaggggtcttgtgcttcctgggtacaagtacctcggacccttcaacggactcgacaaaggagagccggtcaacgaggcagacgccgcggccctcgagcacgacaaggcctacgaccggcagctcgacagcggagacaacccgtacctcaagtacaaccacgccgacgcggagtttcaggagcgtcttaaagaagatacgtcttttgggggcaacctcggacgagcagtattccaggcgaaaaagagggttcttgaacctctgggcctggttgaggagcctgttaagacggctccgggaaaaaagaggccggtagagcactctcctgtggagccagactcctcctcgggaaccggaaaagcgggccagcagcctgcaagaaaaagattgaattttggtcagactggagacgcagactccgtacctgacccccagcctctcggacagccaccagcagcccccacaagtttgggatctactacaatggctacaggcagtggcgcaccaatggcagacaataacgagggtgccgatggagtgggtaattcctcaggaaattggcattgcgattcccaatggctgggcgacagagtcatcaccaccagcacccgaacctgggccctgcccacctacaacaaccacctctacaagcaaatctccagccaatcaggagcatcgaacgacaaccactactttggctacagcaccccttgggggtattttgacttcaacagattccactgtcacttctccccacgtgactggcaaagactcatcaacaacaactggggattccgacccaagagactcaacttcaagctctttaacattcaagtcaaagaggtcacgcagaatgacggtacgacgacgattgccaataaccttaccagcacggttcaggtgtttactgactcggagtaccagctcccgtacgtcctcggctcggcgcatcaaggatgcctcccgccgttcccagcagacgtcttcatggtcccacagtatggatacctcaccctgaacaacgggagtcaggcggtaggacgctcttccttttactgcctggagtactttccttctcagatgcttcgtaccggaaacaactttaccttcagctacacctttgaagacgtgcctttccacagtagctacgctcacagccagagtctggatcggctgatgaatcctcttatcgaccagtacctgtattatctaaacaaaacacaatcaaatagtggaactcttcagcagtctcggctactgtttagtcaagctggacccaccagcatgtctcttcaagctaaaaactggctgcctggaccttgctacagacaacagcgtctgtcaaagcaggcaaacgacaacaacaacagcaactttccctggactgcggctacaaagtatcatctaaatggccgggactcgttggttaatccaggaccagctatggccagccacaaagacgatgaagaaaagtttttccccatgcatggaaccctgatatttggtaaacaaggaacaaatgctaacgacgcggatttggacaatgtcatgattacagatgaagaagaaatccgcaccaccaatcccgtggctacggagcagtacgggactgtgtcaaataatttgcaaaactcaaatactggtccaactactggaactgtcaatcaccaaggagcgttacctggtatggtgtggcaggatcgagacgtgtacctgcagggacccatttgggccaagattcctcacaccgatggacactttcatccttctccactggtgggaggttttggactcaaacacccgcctcctcagatcatgatcaaaaacactcccgttccagccaatcctcctacaaacttcagttctgccaagtttgcttccttcatcacacagtattccacaggacaagtcagcgtggagattgagtgggagctgcagaaggagaacagcaaacgctggaaccccgagatccagtacacttccaactacaacaaatctgttaatgtggactttactgtggacactaatggcgtgtattcagagcctcgccccattggcaccagatacctgactcgtaatctgtaa

SEQ ID NO: 2099 - DNA, 2208 bp, Artificial Sequence
  Synthetic Polynucleotide
atggctgccgatggttatcttccagattggctcgaggacactctctctgaaggaataagacagtggtggaagctcaaacctggcccaccaccgccaaagcccgcagagcggcacaaggacgacagtaggggtcttgtgcttcctgggtacaagtacctcggacccttcaacggactcgacaaaggagagccggtcaacgaggcagacgccgcggccctcgagcacgacaaggcctacgaccggcagctcgacagcggagacaacccgtacctcaagtacaaccacgccgacgcggagtttcaggagcgtcttaaagaagatacgtcttttgggggcaacctcggacgagcagtattccaggcgaaaaagagggttcttgaacctctgggcctggttgaggagcctgttaagacggctccgggaaaaaagaggccggtagagcactctcctgtggagccagactcctcctcgggaaccggaaaagcgggccagcagcctgcaagaaaaagattgaattttggtcagactggagacgcagactccgtacctgacccccagcctctcggacagccaccagcagcccccacaagtttgggatctactacaatggctacaggcagtggcgcaccaatggcagacaataacgagggtgccgatggagtgggtaattcctcaggaaattggcattgcgattcccaatggctgggcgacagagtcatcaccaccagcacccgaacctgggccctgcccacctacaacaaccacctctacaagcaaatctccagccaatcaggagcatcgaacgacaaccactactttggctacagcaccccttgggggtattttgacttcaacagattccactgtcacttctccccacgtgactggcaaagactcatcaacaacaactggggattccgacccaagagactcaacttcaagctctttaacattcaagtcaaagaggtcacgcagaatgacggtacgacgacgattgccaataaccttaccagcacggttcaggtgtttactgactcggagtaccagctcccgtacgtcctcggctcggcgcatcaaggatgcctcccgccgttcccagcagacgtcttcatggtcccacagtatggatacctcaccctgaacaacgggagtcaggcggtaggacgctcttccttttactgcctggagtactttccttctcagatgcttcgtaccggaaacaactttaccttcagctacacctttgaagacgtgcctttccacagtagctacgctcacagccagagtctggatcggctgatgaatcctcttatcgaccagtacctgtattatctaaacaaaacacaatcaaatagtggaactcttcagcagtctcggctactgtttagtcaagctggacccaccagcatgtctcttcaagctaaaaactggctgcctggaccttgctacagacaacagcgtctgtcaaagcaggcaaacgacaacaacaacagcaactttccctggactgcggctacaaagtatcatctaaatggccgggactcgttggttaatccaggaccagctatggccagccacaaagacgatgaagaaaagtttttccccatgcatggaaccctgatatttggtaaacaaggaacaaatgctaacgacgcggatttggacaatgtcatgattacagatgaagaagaaatccgcaccaccaatcccgtggctacggagcagtacgggactgtgtcaaataatttgcaaaactcaaatactggtccaactactggaactgtcaatcaccaaggagcgttacctggtatggtgtggcaggatcgagacgtgtacctgcagggacccatttgggccaagattcctcacaccgatggacactttcatccttctccactgatgggaggttttggactcaaacacccgcctcctcagatcatgatcaaaaacactcccgttccagccaatcctcctacaaacttcagttctgccaagtttgcttccttcatcacacagtattccacaggacaagtcggcgtggagattgagtgggagctgcagaaggagaacagcaaacgctggaaccccgagatccagtacacttccaactacaacaaatctgttaatgtggactttactgtggacactaatggcgtgtattcagagcctcgccccattggcaccagatacctgactcgtaatctgtaa

SEQ ID NO: 2100 - DNA, 2208 bp, Artificial Sequence
  Synthetic Polynucleotide
atggctgccgatggttatcttccagattggctcgaggacactctctctgaaggaataagacagtggtggaagctcaaacctggcccaccaccgccaaagcccgcagagcggcacaaggacgacagtaggggtcttgtgcttcctgggtacaagtacctcggacccttcaacggactcgacaaaggagagccggtcaacgaggcagacgccgcggccctcgagcacgacaaggcctacgaccggcagctcgacagcggagacaacccgtacctcaagtacaaccacgccgacgcggagtttcaggagcgtcttaaagaagatacgtcttttgggggcaacctcggacgagcagtattccaggcgaaaaagagggttcttgaacctctgggcctggttgaggagcctgttaagacggctccgggaaaaaagaggccggtagagcactctcctgtggagccagactcctcctcgggaaccggaaaagcgggccagcagcctgcaagaaaaagattgaattttggtcagactggagacgcagactccgtacctgacccccagcctctcggacagccaccagcagcccccacaagtttgggatctactacaatggctacaggcagtggcgcaccaatggcagacaataacgagggtgccgatggagtgggtaattcctcaggaaattggcattgcgattcccaatggctgggcgacagagtcatcaccaccagcacccgaacctgggccctgcccacctacaacaaccacctctacaagcaaatctccagccaatcaggagcatcgaacgacaaccactactttggctacagcaccccttgggggtattttgacttcaacagattccactgtcacttctccccacgtgactggcaaagactcatcaacaacaactggggattccgacccaagagactcaacttcaagctctttaacattcaagtcaaagaggtcacgcagaatgacggtacgacgacgattgccaataaccttaccagcacggttcaggtgtttactgactcggagtaccagcccccgtacgtcctcggctcggcgcatcaaggatgcctcccgccgttcccagcagacgtcttcatggtcccacagtatggatacctcaccctgaacaacgggagtcaggcggtaggacgctcttccttttactgcctggagtactttccttctcagatgcttcgtaccggaaacaactttaccttcagctacacctttgaagacgtgcctttccacagtagctacgctcacagccagagtctggatcggctgatgaatcctcttatcgaccagtacctgtattatctaaacaaaacacaatcaaatagtggaactcttcagcagtctcggctactgtttagtcaagctggacccaccagcatgtctcttcaagctaaaaactggctgcctggaccttgctacagacaacagcgtctgtcaaagcaggcaaacgacaacaacaacagcaactttccctggactgcggctacaaagtatcatctaaatggccgggactcgttggttaatccaggaccagctatggccagccacaaagacgatgaagaaaagtttttccccatgcatggaaccctgatatttggtaaacaaggaacaaatgctaacgacgcggatttggacaatgtcatgattacagatgaagaagaaatccgcaccaccaatcccgtggctacggagcagtacgggactgtgtcaaataatttgcaaaactcaaatactggtccaactactggaactgtcaatcaccaaggagcgttacctggtatggtgtggcaggatcgagacgtgtacctgcagggacccatttgggccaagattcctcacaccgatggacactttcatccttctccactgatgggaggttttggactcaaacacccgcctcctcagatcatgatcaaaaacactcccgttccagccaatcctcctacaaacttcagttctgccaagtttgcttccttcatcacacagtattccacgggacaagtcagcgtggagattgagtgggagctgcagaaggagaacagcaaacgctggaaccccgagatccagtacacttccaactacaacaaatctgttaatgtggactttactgtggacactaatggcgtgtattcagagcctcgccccattggcaccagatacctgactcgtaatctgtaa

SEQ ID NO: 2101 - DNA, 2208 bp, Artificial Sequence
  Synthetic Polynucleotide
atggctgccgatggttatcttccagattggctcgaggacactctctctgaaggaataagacagtggtggaagctcaaacctggcccaccaccgccaaagcccgcagagcggcacaaggacgacagtaggggtcttgtgcttcctgggtacaagtacctcggacccttcaacggactcgacaaaggagagccggtcaacgaggcagacgccgcggccctcgagcacgacaaggcctacgaccggcagctcgacagcggagacaacccgtacctcaagtacaaccacgccgacgcggagtttcaggagcgtcttaaagaagatacgtcttttgggggcaacctcggacgagcagtattccaggcgaaaaagagggttcttgaacctctgggcctggttgaggagcctgttaagacggctccgggaaaaaagaggccggtagagcactctcctgtggagccagactcctcctcgggaaccggaaaagcgggccagcagcctgcaagaaaaagattgaattttggtcagactggagacgcagactccgtacctgacccccagcctctcggacagccaccagcagcccccacaagtttgggatctactacaatggctacaggcagtggcgcaccaatggcagacaatgacgagggtgccgatggagtgggtaattcctcaggaaattggcattgcgattcccaatggctgggcgacagagtcatcaccaccagcacccgaacctgggccctgcccacctacaacaaccacctctacaagcaaatctccagccaatcaggagcatcgaacgacaaccactactttggctacagcaccccttgggggtattttgacttcaacagattccactgtcacttctccccacgtgactggcaaagactcatcaacaacaactggggattccgacccaagagactcaacttcaagctctttaacattcaagtcaaagaggtcacgcagaatgacggtacgacgacgattgccaataaccttaccagcacggttcaggtgtttactgactcggagtaccagctcccgtacgtcctcggctcggcgcatcaaggatgcctcccgccgttcccagcagacgtcttcatggtcccacagtatggatacctcaccctgaacaacgggagtcaggcggtaggacgctcttccttttactgcctggagtactttccttctcagatgcttcgtaccggaaacaactttaccttcagctacacctttgaagacgtgcctttccacagtagctacgctcacagccagagtctggatcggctgatgaatcctcttatcgaccagtacctgtattatctaaacaaaacacaatcaaatagtggaactcttcagcagtctcggctactgtttagtcaagctggacccaccagcatgtctcttcaagctaaaaactggctgcctggaccttgctacagacaacagcgtctgtcaaagcaggcaaacgacaacaacaacagcaactttccctggactgcggctacaaagtatcatctaaatggccgggactcgttggttaatccaggaccagctatggccagccacaaagacgatgaagaaaagtttttccccatgcatggaaccctgatatttggtaaacaaggaacaaatgctaacgacgcggatttggacaatgtcatgattacagatgaagaagaaatccgcaccaccaatcccgtggctacggagcagtacgggactgtgtcaaataatttgcaaaactcaaatactggtccaactactggaactgtcaatcaccaaggagcgttacctggtatggtgtggcaggatcgagacgtgtacctgcagggacccatttgggccaagattcctcacaccgatggacactttcatccttctccactgatgggaggttttggactcaaacacccgcctcctcagatcatgatcaaaaacactcccgttccagccaatcctcctacaaacttcagttctgccaagtttgcttccttcatcacacagtattccacaggacaagtcagcgtggagattgagtgggagctgcagaaggagaacagcaaacgctggaaccccgagatccagtacacttccaactacaacaaatctgttaatgtggactttactgtggacactaatggcgtgtattcagagcctcgccccattggcaccagatacctgactcgtaatctgtaa

SEQ ID NO: 2102 - DNA, 2208 bp, Artificial Sequence
  Synthetic Polynucleotide
atggctgccgatggttatcttccagattggctcgaggacactctctctgaaggaataagacagtggtggaagctcaaacctggcccaccaccgccaaagcccgcagagcggcacaaggacgacagtaggggtcttgtgcttcctgggtacaagtacctcggacccttcaacggactcgacaaaggagagccggtcaacgaggcagacgccgcggccctcgagcacgacaaggcctacgaccggcagctcgacagcggagacaacccgtacctcaagtacaaccacgccgacgcggagtttcaggagcgtcttaaagaagatacgtcttttgggggcaacctcggacgagcagtattccaggcgaaaaagagggttcttgaacctctgggcctggttgaggagcctgttaagacggctccgggaaaaaagaggccggtagagcactctcctgtggagccagactcctcctcgggaaccggaaaagcgggccagcagcctgcaagaaaaagattgaattttggtcagactggagacgcagactccgtacctgacccccagcctctcggacagccaccagcagcccccacaagtttgggatctactacaatggctacaggcagtggcgcaccaatggcagacaataacgagggtgccgatggagtgggtaattcctcaggaaattggcattgcgattcccaatggctgggcgacagagtcatcaccaccagcacccgaacctgggccctgcccacctacaacaaccacctctacaagcaaatctccagccaatcaggagcatcgaacgacaaccactactttggctacagcaccccttgggggtattttgacttcaacagattccactgtcacttctccccacgtgactggcaaagactcatcaacaacaactggggattccgacccaagagactcaacttcaagctctttaacattcaagtcaaagaggtcacgcagaatgacggtacgacgacgattgccaataaccttaccagcacggttcaggtgtttactgactcggagtaccagctcccgtacgtcctcggctcggcgcatcaaggatgcctcccgccgttcccagcagacgtcttcatggtcccacagtatggatacctcaccctgaacaacgggagtcaggcggtaggacgctcttccttttactgcctggagtactttccttctcagatgcttcgtaccggaaacaactttaccttcagctacacctttgaagacgtgcctttccacagtagctacgctcacagccagagtctggatcggctgatgaatcctcttatcgaccagtacctgtattatctaaacaaaacacaatcaaatagtggaactcttcagcagtctcggctactgtttagtcaagctggacccaccagcatgtctcttcaagctaaaaactggctgcctggaccttgctacagacaacagcgtctgccaaagcaggcaaacgacaacaacaacagcaactttccctggactgcggctacaaagtatcatctaaatggccgggactcgttggttaatccaggaccagctatggccagccacaaagacgatgaagaaaagtttttccccatgcatggaaccctgatatttggtaaacaaggaacaaatgctaacgacgcggatttggacaatgtcatgattacagatgaagaagaaatccgcaccaccaatcccgtggctacggagcagtacgggactgtgtcaaataatttgcaaaactcaaatactggtccaactactggaactgtcaatcaccaaggagcgttacctggtatggtgtggcaggatcgagacgtgtacctgcagggacccatttgggccaagattcctcacaccgatggacactttcatccttctccactgatgggaggttttggactcaaacacccgcctcctcagatcatgatcaaaaacactcccgttccagccaatcctcctacaaacttcagttctgccaagtttgcttccttcatcacacagtattccacgggacaagtcagcgtggagattgagtgggagctgcagaaggagaacagcaaacgctggaaccccgagatccagtacacttccaactacaacaaatctgttaatgtggactttactgtggacactaatggcgtgtattcagagcctcgccccattggcaccagatacctgactcgtaatctgtaa

SEQ ID NO: 2103 - DNA, 2208 bp, Artificial Sequence
  Synthetic Polynucleotide
atggctgccgatggttatcttccagattggctcgaggacactctctctgaaggaataagacagtggtggaagctcaaacctggcccaccaccgccaaagcccgcagagcggcacaaggacgacagtaggggtcttgtgcttcctgggtacaagtacctcggacccttcaacggactcgacaaaggagagccggtcaacgaggcagacgccgcggccctcgagcacgacaaggcctacgaccggcagctcgacagcggagacaacccgtacctcaagtacaaccacgccgacgcggagtttcaggagcgtcttaaagaagatacgtcttttgggggcaacctcggacgagcagtattccaggcgaaaaagagggttcttgaacctctgggcctggttgaggagcctgttaagacggctccgggaaaaaagaggccggtagagcactctcctgtggagccagactcctcctcgggaaccggaaaagcgggccagcagcctgcaagaaaaagattgaattttggtcagactggagacgcagactccgtacctgacccccagcctctcggacagccaccagcagcccccacaagtttgggatctactacaatggctacaggcagtggcgcaccaatggcagacaataacgagggtgccgatggagtgggtaattcctcaggaaattggcattgcgattcccaatggctgggcgacagagtcatcaccaccagcacccgaacctgggccctgcccacctacaacaaccacctctacaagcaaatctccagccaatcaggagcatcgaacgacaaccactactttggctacagcaccccttgggggtattttgacttcaacagattccactgtcacttctccccacgtgactggcaaagactcatcaacaacaactggggattccgacccaagagactcaacttcaagctctttaacattcaagtcaaagaggtcacgcagaatgacggtacgacgacgattgccaataaccttaccagcacggttcaggtgtttactgactcggagtaccagctcccgtacgtcctcggctcggcgcatcaaggatgcctcccgccgttcccagcagacgtcttcatggtcccacagtatggatacctcaccctgaacaacgggagtcaggcggtaggacgctcttccttttactgcctggagtactttccttctcagatgcttcgtaccggaaacaactttaccttcagctacacctttgaagacgtgcctttccacagtagctacgctcacagccagagtctggatcggctgatgaatcctcttatcgaccagtacctgtattatctaaacaaaacacaatcaaatagtggaactcttcagcagtctcggctactgtttagtcaagctggacccaccagcatgtctcttcaagctaaaaactggctgcctggaccttgctacagacaacagcgtctgtcaaagcaggcaaacgacaacaacaacagcaactttccctggactgcggctacaaagtatcatctaaatggccgggactcgttggttaatccaggaccagctatggccagccacaaagacgatgaagaaaagtttttccccatgcatggaaccctgatatttggtaaacaaggaacaaatgctaacgacgcggatttggacaatgtcatgattacagatgaagaagaaatccgcaccaccaatcccgtggctacggagcagtacgggactgtgtcaaataatttgcaaaactcaaatactggtccaactactggaactgtcaatcaccaaggagcgttacctggtatggtgtggcaggatcgagacgtgtacctgcagggacccatttgggccaagattcctcacaccgatggacactttcatccttctccactgatgggaggttttggactcaaacacccgcctcctcagatcatgatcaaaaacactcccgttccagccaatcctcctacaaacctcagttctgccaagtttgcttccttcatcacacagtattccacgggacaagtcagcgtggagattgagtgggagctgcagaaggagaacagcaaacgctggaaccccgagatccagtacacttccaactacaacaaatctgttaatgtggactttactgtggacactaatggcgtgtattcagagcctcgccccattggcaccagatacctgactcgtaatctgtaa

SEQ ID NO: 2104 - DNA, 2208 bp, Artificial Sequence
  Synthetic Polynucleotide
atggctgccgatggttatcttccagattggctcgaggacactctctctgaaggaataagacagtggtggaagctcaaacctggcccaccaccgccaaagcccgcagagcggcacaaggacgacagtaggggtcttgtgcttcctgggtacaagtacctcggacccttcaacggactcgacaaaggagagccggtcaacgaggcagacgccgcggccctcgagcacgacaaggcctacgaccggcagctcgacagcggagacaacccgtacctcaagtacaaccacgccgacgcggagtttcaggagcgtcttaaagaagatacgtcttttgggggcaacctcggacgagcagtattccaggcgaaaaagagggttcttgaacctctgggcctggttgaggagcctgttaagacggctccgggaaaaaagaggccggtagagcactctcctgtggagccagactcctcctcgggaaccggaaaagcgggccagcagcctgcaagaaaaagattgaattttggtcagactggagacgcagactccgtacctgacccccagcctctcggacagccaccagcagcccccacaagtttgggatctactacaatggctacaggcagtggcgcaccaatggcagacaataacgagggtgccgatggagtgggtaattcctcaggaaattggcattgcgattcccaatggctgggcgacagagtcatcaccaccagcacccgaacctgggccctgcccacctacaacaaccacctctacaagcaaatctccagccaatcaggagcatcgaacgacaaccactactttggctacagcaccccttgggggtattttgacttcaacagattccactgtcacttctccccacgtgactggcaaagactcatcaacaacaactggggattccgacccaagagactcaacttcaagctctttaacattcaagtcaaagaggtcacgcagaatgacggtacgacgacgattgccaataaccttaccagcacggttcaggtgtttactgactcggagtaccagctcccgtacgtcctcggctcggcgcatcaaggatgcctcccgccgttcccagcagacgtcttcatggtcccacagtatggatacctcaccccgaacaacgggagtcaggcggtaggacgctcttccttttactgcctggagtactttccttctcagatgcttcgtaccggaaacaactttaccttcagctacacctttgaagacgtgcctttccacagtagctacgctcacagccagagtctggatcggctgatgaatcctcttatcgaccagtacctgtattatctaaacaaaacacaatcaaatagtggaactcttcagcagtctcggctactgtttagtcaagctggacccaccagcatgtctcttcaagctaaaaactggctgcctggaccttgctacagacaacagcgtctgtcaaagcaggcaaacgacaacaacaacagcaactttccctggactgcggctacaaagtatcatctaaatggccgggactcgttggttaatccaggaccagctatggccagccacaaagacgatgaagaaaagtttttccccatgcatggaaccctgatatttggtaaacaaggaacaaatgctaacgacgcggatttggacaatgtcatgattacagatgaagaagaaatccgcaccaccaatcccgtggctacggagcagtacgggactgtgtcaaataatttgcaaaactcaaatactggtccaactactggaactgtcaatcaccaaggagcgttacctggtatggtgtggcaggatcgagacgtgtacctgcagggacccatttgggccaagattcctcacaccgatggacactttcatccttctccactgatgggaggttttggactcaaacacccgcctcctcagatcatgatcaaaaacactcccgttccagccaatcctcctacaaacttcagttctgccaagtttgcttccttcatcacacagtattccacaggacaagtcagcgtggagattgagtgggagctgcagaaggagaacagcaaacgctggaaccccgagatccagtacacttccaactacaacaaatctgttaatgtggactttactgtggacactaatggcgtgtattcagagcctcgccccattggcaccagatacctgactcgtaatctgtaa

SEQ ID NO: 2105 - DNA, 2208 bp, Artificial Sequence
  Synthetic Polynucleotide
atggctgccgatggttatcttccagattggctcgaggacactctctctgaaggaataagacagtggtggaagctcaaacctggcccaccaccgccaaagcccgcagagcggcacaaggacgacagtaggggtcttgtgcttcctgggtacaagtacctcggacccttcaacggactcgacaaaggagagccggtcaacgaggcagacgccgcggccctcgagcacgacaaggcctacgaccggcagctcgacagcggagacaacccgtacctcaagtacaaccacgccgacgcggagtttcaggagcgtcttaaagaagatacgtcttttgggggcaacctcggacgagcagtattccaggcgaaaaagagggttcttgaacctctgggcctggttgaggagcctgttaagacggctccgggaaaaaagaggccggtagagcactctcctgtggagccagactcctcctcgggaaccggaaaagcgggccagcagcctgcaagaaaaagattgaattttggtcagactggagacgcagactccgtacctgacccccagcctctcggacagccaccagcagcccccacaagtttgggatctactacaatggctacaggcagtggcgcaccaatggcagacaataacgagggtgccgatggagtgggtaattcctcaggaaattggcattgcgattcccaatggctgggcgacagagtcatcaccaccagcacccgaacctgggccctgcccacctacaacaaccacctctacaagcaaatctccagccaatcaggagcatcgaacgacaaccactactttggctacagcaccccttgggggtattttgacttcaacagattccactgtcacttctccccacgtgactggcaaagactcatcaacaacaactggggattccgacccaagagactcaacttcaagctctttaacattcaagtcaaagaggtcacgcagaatgacggtacgacgacgattgccaataaccttaccagcacggttcaggtgtttactgactcggagtaccagctcccgtacgtcctcggctcggcgcatcaaggatgcctcccgccgttcccagcagacgtcttcatggtcccacagtatggatacctcaccctgaacaacgggagtcaggcggtaggacgctcttccttttactgcctggagtactttccttctcagatgcttcgtaccggaaacaactttaccttcagctacacctttgaagacgtgcctttccacagtagctacgctcacagccagagtctggatcggctgatgaatcctcttatcgaccagtacctgtattatctaaacaaaacacaatcaaatagtggaactcttcggcagtctcggctactgtttagtcaagctggacccaccagcatgtctcttcaagctaaaaactggctgcctggaccttgctacagacaacagcgtctgtcaaagcaggcaaacgacaacaacaacagcaactttccctggactgcggctacaaagtatcatctaaatggccgggactcgttggttaatccaggaccagctatggccagccacaaagacgatgaaggaaagtttttccccatgcatggaaccctgatatttggtaaacaaggaacaaatgctaacgacgcggatttggacaatgtcatgattacagatgaagaagaaatccgcaccaccaatcccgtggctacggagcagtacgggactgtgtcaaataatttgcaaaactcaaatactggtccaactactggaactgtcaatcaccaaggagcgttacctggtatggtgtggcaggatcgagacgtgtacctgcagggacccatttgggccaagattcctcacaccgatggacactttcatccttctccactgatgggaggttttggactcaaacacccgcctcctcagatcatgatcaaaaacactcccgttccagccaatcctcctacaaacttcagttctgccaagtttgcttccttcatcacacagtattccacaggacaagtcagcgtggagattgagtgggagctgcagaaggagaacagcaaacgctggaaccccgagatccagtacacttccaactacaacaaatctgttaatgtggactttactgtggacactaatggcgtgtattcagagcctcgccccattggcaccagatacctgactcgtaatctgtaa

SEQ ID NO: 2106 - DNA, 2208 bp, Artificial Sequence
  Synthetic Polynucleotide
atggctgccgatggttatcttccagattggctcgaggacactctctctgaaggaataagacagtggtggaagctcaaacctggcccaccaccgccaaagcccgcagagcggcacaaggacgacagtaggggtcttgtgcttcctgggtacaagtacctcggacccttcaacggactcgacaaaggagagccggtcaacgaggcagacgccgcggccctcgagcacgacaaggcctacgaccggcagctcgacagcggagacaacccgtacctcaagtacaaccacgccgacgcggagtttcaggagcgtcttaaagaagatacgtcttttgggggcaacctcggacgagcagtattccaggcgaaaaagagggttcttgaacctctgggcctggttgaggagcctgttaagacggctccgggaaaaaagaggccggtagagcactctcctgtggagccagactcctcctcgggaaccggaaaagcgggccagcagcctgcaagaaaaagattgaattttggtcagactggagacgcagactccgtacctgacccccagcctctcggacagccaccagcagcccccacaagtttgggatctactacaatggctacaggcagtggcgcaccaatggcagacaataacgagggtgccgatggagtgggtaattcctcaggaaattggcattgcgattcccaatggctgggcgacagagtcatcaccaccagcacccgaacctgggccctgcccacctacaacaaccacctctacaagcaaatctccagccaatcaggagcatcgaacgacaaccactactttggctacagcaccccttgggggtattttgacttcaacagattccactgtcacttctccccacgtgactggcaaagactcatcaacaacaactggggattccgacccaagagactcaacttcaagctctttaacattcaagtcaaagaggtcacgcagaatgacggtacgacgacgattgccaataaccttaccagcacggttcaggtgtttactgactcggagtaccagctcccgtacgtcctcggctcggcgcatcaaggatgcctcccgccgttcccagcagacgtcttcatggtcccacagtatggatacctcaccctgaacaacgggagtcaggcggtaggacgctcttccttttactgcctggagtactttccttctcagatgcttcgtaccggaaacaactttaccttcagctacacctttgaagacgtgcctttccacagtagctacgctcacagccagagtctggatcggctgatgaatcctcttatcgaccagtacctgtattatctaaacaaaacacaatcaaatagtggaactcttcagcagtctcggctactgtttagtcaagctggacccaccagcatgtctcttcaagctaaaaactggctgcctggaccttgctacagacaacagcgtctgtcaaagcaggcaaacgacaacaacaacagcaactttccctggactgcggctacaaagtatcatctaaatggccgggactcgttggttaatccaggaccagctatggccagccacaaagacgatgaagaaaagtttttccccatgcatggaaccctgatatttggtaaacaaggaacaaatgctaacgacgcggatttggacaatgccatgattacagatgaagaagaaatccgcaccaccaatcccgtggctacggagcagtacgggactgtgtcaaataatttgcaaaactcaaatactggtccaactactggaactgtcaatcaccaaggagcgttacctggtatggtgtggcaggatcgagacgtgtacctgcagggacccatttgggccaagattcctcacaccgatggacactttcatccttctccactgatgggaggttttggactcaaacacccgcctcctcagatcatgatcaaaaacactcccgttccagccaatcctcctacaaacttcagttctgccaagtttgcttccttcatcacacagtattccacaggacaagtcagcgtggagattgagtgggagctgcagaaggagaacagcaaacgctggaaccccgagatccagtacacttccaactacaacaaatctgttaatgtggactttactgtggacactaatggcgtgtattcagagcctcgccccattggcaccagatacctgactcgtaatctgtaa

SEQ ID NO: 2107 - DNA, 2208 bp, Artificial Sequence
  Synthetic Polynucleotide
atggctgccgatggttatcttccagattggctcgaggacactctctctgaaggaataagacagtggtggaagctcaaacctggcccaccaccgccaaagcccgcagagcggcacaaggacgacagtaggggtcttgtgcttcctgggtacaagtacctcggacccttcaacggactcgacaaaggagagccggtcaacgaggcagacgccgcggccctcgagcacgacaaggcctacgaccggcagctcgacagcggagacaacccgtacctcaagtacaaccacgccgacgcggagtttcaggagcgtcttaaagaagatacgtcttttgggggcaacctcggacgagcagtattccaggcgaaaaagagggttcttgaacctctgggcctggttgaggagcctgttaagacggctccgggaaaaaagaggccggtagagcactctcctgtggagccagactcctcctcgggaaccggaaaagcgggccagcagcctgcaagaaaaagattgaattttggtcagactggagacgcagactccgtacctgacccccagcctctcggacagccaccagcagcccccacaagtttgggatctactacaatggctacaggcagtggcgcaccaatggcaggcaataacgagggtgccgatggagtgggtaattcctcaggaaattggcattgcgattcccaatggctgggcgacagagtcatcaccaccagcacccgaacctgggccctgcccacctacaacaaccacctctacaagcaaatctccagccaatcaggagcatcgaacgacaaccactactttggctacagcaccccttgggggtattttgacttcaacagattccactgtcacttctccccacgtgactggcaaagactcatcaacaacaactggggattccgacccaagagactcaacttcaagctctttaacattcaagtcaaagaggtcacgcagaatgacggtacgacgacgattgccaataaccttaccagcacggttcaggtgtttactgactcggagtaccagctcccgtacgtcctcggctcggcgcatcaaggatgcctcccgccgttcccagcagacgtcttcatggtcccacagtatggatacctcaccctgaacaacgggagtcaggcggtaggacgctcttccttttactgcctggagtactttccttctcagatgcttcgtaccggaaacaactttaccttcagctacacctttgaagacgtgcctttccacagtagctacgctcacagccagagtctggatcggctgatgaatcctcttatcgaccagtacctgtattatctaaacaaaacacaatcaaatagtggaactcttcagcagtctcggctactgtttagtcaagctggacccaccagcatgtctcttcaagctaaaaactggctgcctggaccttgctacagacaacagcgtctgtcaaagcaggcaaacgacaacaacaacagcaactttccctggactgcggctacaaagtatcatctaaatggccgggactcgttggttaatccaggaccagctatggccagccacaaagacgatgaagaaaagtttttccccatgcatggaaccctgatatttggtaaacaaggaacaaatgctaacgacgcggatttggacaatgtcatgattacagatgaagaagaaatccgcaccaccaatcccgtggctacggagcagtacgggactgtgtcaaataatttgcaaaactcaaatactggtccaactactggaactgtcaatcaccaaggagcgttacctggtatggtgtggcaggatcgagacgtgtacctgcagggacccatttgggccaagattcctcacaccgatggacactttcatccttctccactgatgggaggttttggactcaaacacccgcctcctcagatcatgatcaaaaacactcccgttccagccaatcctcctacaaacttcagttctgccaagtttgcttccttcatcacacagtattccacaggacaagtcagcgtggagattgagtgggagctgcagaaggagaacagcaaacgctggaaccccgagatccagtacacttccaactacaacaaatctgttaatgtggactttactgtggacactaatggcgtgtattcagagcctcgccccattggcaccagatacctgactcgtaatctgtaa

SEQ ID NO: 2108 - DNA, 2208 bp, Artificial Sequence
  Synthetic Polynucleotide
atggctgccgatggttatcttccagattggctcgaggacactctctctgaaggaataagacagtggtggaagctcaaacctggcccaccaccgccaaagcccgcagagcggcacaaggacgacagtaggggtcttgtgcttcctgggtacaagtacctcggacccttcaacggactcgacaaaggagagccggtcaacgaggcagacgccgcggccctcgagcacgacaaggcctacgaccggcagctcgacagcggagacaacccgtacctcaagtacaaccacgccgacgcggagtttcaggagcgtcttaaagaagatacgtcttttgggggcaacctcggacgagcagtattccaggcgaaaaagagggttcttgaacctctgggcctggttgaggagcctgttaagacggctccgggaaaaaagaggccggtagagcactctcctgtggagccagactcctcctcgggaaccggaaaagcgggccagcagcctgcaagaaaaagattgaattttggtcagactggagacgcagactccgtacctgacccccagcctctcggacagccaccagcagcccccacaagtttgggatctactacaatggctacaggcagtggcgcaccaatggcagacaataacgagggtgccgatggagtgggtaattcctcaggaaattggcattgcgattcccaatggctgggcgacagagtcatcaccaccagcacccgaacctgggccctgcccacctacaacaaccacctctacaagcaaatctccagccaatcaggagcatcgaacgacaaccactactttggctacagcaccccttgggggtattttgacttcaacagattccactgtcacttctccccacgtgactggcaaagactcatcaacaacaactggggattccgacccaagagactcaacttcaagctctttaacattcaagtcaaagaggtcgcgcagaatgacggtacgacgacgattgccaataaccttaccagcacggttcaggtgtttactgactcggagtaccagctcccgtacgtcctcggctcggcgcatcaaggatgcctcccgccgttcccagcagacgtcttcatggtcccacagtatggatacctcaccctgaacaacgggagtcaggcggtaggacgctcttccttttactgcctggagtactttccttctcagatgcttcgtaccggaaacaactttaccttcagctacacctttgaagacgtgcctttccacagtagctacgctcacagccagagtctggatcggctgatgaatcctcttatcgaccagtacctgtattatctaaacaaaacacaatcaaatagtggaactcttcagcagtctcggctactgtttagtcaagctggacccaccagcatgtctcttcaagctaaaaactggctgcctggaccttgctacagacaacagcgtctgtcaaagcaggcaaacgacaacaacaacagcaactttccctggactgcggctacaaagtatcatctaaatggccgggactcgttggttaatccaggaccagctatggccagccacaaagacgatgaagaaaagtttttccccatgcatggaaccctgatatttggtaaacaaggaacaaatgctaacgacgcggatttggacaatgtcatgattacagatgaagaagaaatccgcaccaccaatcccgtggctacggagcagtacgggactgtgtcaaataatttgcaaaactcaaatactggtccaactactggaactgtcaatcaccaaggagcgttacctggtatggtgtggcaggatcgagacgtgtacctgcagggacccatttgggccaagattcctcacaccgatggacactttcatccttctccactgatgggaggttttggactcaaacacccgcctcctcagatcatgatcaaaaacactcccgttccagccaatcctcctacaaacttcagttctgccaagtttgcttccttcatcacacagtattccacaggacaagtcagcgtggagattgagtgggagctgcagaaggagaacagcaaacgctggaaccccgagatccagtacacttccaactacaacaaatctgttaatgtggactttactgtggacactaatggcgtgtattcagagcctcgccccattggcaccagatacctgactcgtaatctgtaa

SEQ ID NO: 2109 - DNA, 2208 bp, Artificial Sequence
  Synthetic Polynucleotide
atggctgccgatggttatcttccagattggctcgaggacactctctctgaaggaataagacagtggtggaagctcaaacctggcccaccaccgccaaagcccgcagagcggcacaaggacgacagtaggggtcttgtgcttcctgggtacaagcacctcggacccttcaacggactcgacaaaggagagccggtcaacgaggcagacgccgcggccctcgagcacgacaaggcctacgaccggcagctcgacagcggagacaacccgtacctcaagtacaaccacgccgacgcggagtttcaggagcgtcttaaagaagatacgtcttttgggggcaacctcggacgagcagtattccaggcgaaaaagagggttcttgaacctctgggcctggttgaggagcctgttaagacggctccgggaaaaaagaggccggtagagcactctcctgtggagccagactcctcctcgggaaccggaaaagcgggccagcagcctgcaagaaaaagattgaattttggtcagactggagacgcagactccgtacctgacccccagcctctcggacagccaccagcagcccccacaagtttgggatctactacaatggctacaggcagtggcgcaccaatggcagacaataacgagggtgccgatggagtgggtaattcctcaggaaattggcattgcgattcccaatggctgggcgacagagtcatcaccaccagcacccgaacctgggccctgcccacctacaacaaccacctctacaagcaaatctccagccaatcaggagcatcgaacgacaaccactactttggctacagcaccccttgggggtattttgacttcaacagattccactgtcacttctccccacgtgactggcaaagactcatcaacaacaactggggattccgacccaagagactcaacttcaagctctttaacattcaagtcaaagaggtcacgcagaatgacggtacgacgacgattgccaataaccttaccagcacggttcaggtgtttactgactcggagtaccagctcccgtacgtcctcggctcggcgcatcaaggatgcctcccgccgttcccagcagacgtcttcatggtcccacagtatggatacctcaccctgaacaacgggagtcaggcggtaggacgctcttccttttactgcctggagtactttccttctcagatgcttcgtaccggaaacaactttaccttcagctacacctttgaagacgtgcctttccacagtagctacgctcacagccagagtctggatcggctgatgaatcctcttatcgaccagtacctgtattatctaaacaaaacacaatcaaatagtggaactcttcagcagtctcggctactgtttagtcaagctggacccaccagcatgtctcttcaagctaaaaactggctgcctggaccttgctacagacaacagcgtctgtcaaagcaggcaaacgacaacaacaacagcaactttccctggactgcggctacaaagtatcatctaaatggccgggactcgttggttaatccaggaccagctatggccagccacaaagacgatgaagaaaagtttttccccatgcatggaaccctgatatttggtaaacaaggaacaaatgctaacgacgcggatttggacaatgtcatgattacagatgaagaagaaatccgcaccaccaatcccgtggctacggagcagtacgggactgtgtcaaataatttgcaaaactcaaatactggtccaactactggaactgtcaatcaccaaggagcgttacctggtatggtgtggcaggatcgagacgtgtacctgcagggacccatttgggccaagattcctcacaccgatggacactttcatccttctccactgatgggaggttttggactcaaacacccgcctcctcagatcatgatcaaaaacactcccgttccagccaatcctcctacaaacttcagttctgccaagtttgcttccttcatcacacagtattccacaggacaagtcagcgtggagattgagtgggagctgcagaaggagaacagcaaacgctggaaccccgagatccagtacacttccaactacaacaaatctgttaatgtggactttactgtggacactaatggcgtgtattcagagcctcgccccattggcaccagatacctgactcgtaatctgtaa

SEQ ID NO: 2110 - DNA, 2208 bp, Artificial Sequence
  Synthetic Polynucleotide
atggctgccgatggttatcttccagattggcccgaggacactctctctgaaggaataagacagtggtggaagctcaaacctggcccaccaccgccaaagcccgcagagcggcacaaggacgacagtaggggtcttgtgcttcctgggtacaagtacctcggacccttcaacggactcgacaaaggagagccggtcaacgaggcagacgccgcggccctcgagcacgacaaggcctacgaccggcagctcgacagcggagacaacccgtacctcaagtacaaccacgccgacgcggagtttcaggagcgtcttaaagaagatacgtcttttgggggcaacctcggacgagcagtattccaggcgaaaaagagggttcttgaacctctgggcctggttgaggagcctgttaagacggctccgggaaaaaagaggccggtagagcactctcctgtggagccagactcctcctcgggaaccggaaaagcgggccagcagcctgcaagaaaaagattgaattttggtcagactggagacgcagactccgtacctgacccccagcctctcggacagccaccagcagcccccacaagtttgggatctactacaatggctacaggcagtggcgcaccaatggcagacaataacgagggtgccgatggagtgggtaattcctcaggaaattggcattgcgattcccaatggctgggcgacagagtcatcaccaccagcacccgaacctgggccctgcccacctacaacaaccacctctacaagcaaatctccagccaatcaggagcatcgaacgacaaccactactttggctacagcaccccttgggggtattttgacttcaacagattccactgtcacttctccccacgtgactggcaaagactcatcaacaacaactggggattccgacccaagagactcaacttcaagctctttaacattcaagtcaaagaggtcacgcagaatgacggtacgacgacgattgccaataaccttaccagcacggttcaggtgtttactgactcggagtaccagctcccgtacgtcctcggctcggcgcatcaaggatgcctcccgccgttcccagcagacgtcttcatggtcccacagtatggatacctcaccctgaacaacgggagtcaggcggtaggacgctcttccttttactgcctggagtactttccttctcagatgcttcgtaccggaaacaactttaccttcagctacacctttgaagacgtgcctttccacagtagctacgctcacagccagagtctggatcggctgatgaatcctcttatcgaccagtacctgtattatctaaacaaaacacaatcaaatagtggaactcttcagcagtctcggctactgtttagtcaagctggacccaccagcatgtctcttcaagctaaaaactggctgcctggaccttgctacagacaacagcgtctgtcaaagcaggcaaacgacaacaacaacagcaactttccctggactgcggctacaaagtatcatctaaatggccgggactcgttggttaatccaggaccagctatggccagccacaaagacgatgaagaaaagtttttccccatgcatggaaccctgatatttggtaaacaaggaacaaatgctaacgacgcggatttggacaatgtcatgattacagatgaagaagaaatccgcaccaccaatcccgtggctacggagcagtacgggactgtgtcaaataatttgcaaaactcaaatactggtccaactactggaactgtcaatcaccaaggagcgttacctggtatggtgtggcaggatcgagacgtgtacctgcagggacccatttgggccaagattcctcacaccgatggacactttcatccttctccactgatgggaggttttggactcaaacacccgcctcctcagatcatgatcaaaaacactcccgttccagccaatcctcctacaaacttcagttctgccaagtttgcttccttcatcacacagtattccacaggacaagtcagcgtggagattgagtgggagctgcagaaggagaacagcaaacgctggaaccccgagatccagtacacttccaactacaacaaatctgttaatgtggactttactgtggacactaatggcgtgtattcagagcctcgccccattggcaccagatacctgactcgtaatctgtaa

SEQ ID NO: 2111 - DNA, 2208 bp, Artificial Sequence
  Synthetic Polynucleotide
atggctgccgatggttatcttccagattggctcgaggacactctctctgaaggaataagacagtggtggaagctcaaacctggcccaccaccgccaaagcccgcagagcggcacaaggacgacagtaggggtcttgtgcttcctgggtacaagtacctcggacccttcaacggactcgacaaaggagagccggtcaacgaggcagacgccgcggccctcgagcacgacaaggcctacgaccggcagctcgacagcggagacaacccgtacctcaagtacaaccacgccgacgcggagtttcaggagcgtcttaaagaagatacgtcttttgggggcaacctcggacgagcagtattccaggcgaaaaagagggttcttgaacctctgggcctggttgaggagcctgttaagacggctccgggaaaaaagaggccggtagagcactctcctgtggagccagactcctcctcgggaaccggaaaagcgggccagcagcctgcaagaaaaagattgaattttggtcagactggagacgcagactccgtacctgacccccagcctctcggacagccaccagcagcccccacaagtttgggatctactacaatggctacaggcagtggcgcaccaatggcagacaataacgagggtgccgatggagtgggtaattcctcaggaaattggcattgcgattcccaatggctgggcgacagagtcatcaccaccagcacccgaacctgggccctgcccacctacaacaaccacctctacaagcaaatctccagccaatcaggagcatcgaacgacaaccactactttggctacagcaccccttgggggtattttgacttcaacagattccactgtcacttctccccacgtgactggcaaagactcatcaacaacaactggggattccgacccaagagactcaacttcaagctctttaacattcaagtcaaagaggtcacgcagaatgacggtacgacgacgattgccaataaccttaccagcacggttcaggtgtttactgactcggagtaccagctcccgtacgtcctcggctcggcgcatcaaggatgcctcccgccgttcccagcagacgtcttcatggtcccacagtatggatacctcaccctgaacaacgggagtcaggcggtaggacgctcttccttttactgcctggagtactttccttctcagatgcttcgtaccggaaacaactttaccttcagctacacctttgaagacgtgcctttccacagtagctacgctcacagccagagtctggatcggctgatgaatcctcttatcgaccagtacctgtattatctaaacaaaacacaatcaaatagtggaactcttcagcagtctcggctactgtttagtcaagctggacccaccagcatgtctcttcaagctaaaaactggctgcctggaccttgctacagacaacagcgtctgtcaaagcaggcaaacgacaacaacaacagcaactttccctggactgcggctacaaagtatcatctaaatggccgggactcgttggttaatccaggaccagctatggccagccacaaagacgatgaagaaaagtttttccccatgcatggaaccctgatatttggtaaacaaggaacaaatgctaacgacgcggatttggacaatgtcatgattacagatgaagaagaaatccgcaccaccaatcccgtggctacggagcagtacgggactgtgtcaaataatttgcaaaactcaaatactggtccaactactggaactgtcaatcaccaaggagcgttacctggtatggtgtggcaggatcgaggcgtgtacctgcagggacccatttgggccaagattcctcacaccgatggacactttcatccttctccactgatgggaggttttggactcaaacacccgcctcctcagatcatgatcaaaaacactcccgttccagccaatcctcctacaaacttcagttctgccaagtttgcttccttcatcacacagtattccacgggacaagtcagcgtggagattgagtgggagctgcagaaggagaacagcaaacgctggaaccccgagatccagtacacttccaactacaacaaatctgttaatgtggactttactgtggacactaatggcgtgtattcagagcctcgccccattggcaccagatacctgactcgtaatctgtaa

SEQ ID NO: 2112 - DNA, 2208 bp, Artificial Sequence
  Synthetic Polynucleotide
atggctgccgatggttatcttccagattggctcgaggacactctctctgaaggaataagacagtggtggaagctcaaacctggcccaccaccgccaaagcccgcagagcggcacaaggacgacagtaggggtcttgtgcttcctgggtacaagtacctcggacccttcaacggactcgacaaaggagagccggtcaacgaggcagacgccgcggccctcgagcacgacaaggcctacgaccggcagctcgacagcggagacaacccgtacctcaagtacaaccacgccgacgcggagtttcaggagcgtcttaaagaagatacgtcttttgggggcaacctcggacgagcagtattccaggcgaaaaagagggttcttgaacctctgggcctggttgaggagcctgttaagacggctccgggaaaaaagaggccggtagagcactctcctgtggagccagactcctcctcgggaaccggaaaagcgggccagcagcctgcaagaaaaagattgaattttggtcagactggagacgcagactccgtacctgacccccagcctctcggacagccaccagcagcccccacaagtttgggatctactacaatggctacaggcagtggcgcaccaatggcagacaataacgagggtgccgatggagtgggtaattcctcaggaaattggcattgcgattcccaatggctgggcgacagagtcatcaccaccagcacccgaacctgggccctgcccacctacaacaaccacctctacaagcaaatctccagccaatcaggagcatcgaacgacaaccactactttggctacagcaccccttgggggtattttgacttcaacagattccactgtcacttctccccacgtgactggcaaagactcatcaacaacaactggggattccgacccaagagactcaacttcaagctctttaacattcaagtcaaagaggtcacgcagaatgacggtacgacgacgattgccaataaccttaccagcacggttcaggtgtttactgactcggagtaccagctcccgtacgtcctcggctcggcgcatcaaggatgcctcccgccgttcccagcagacgtcttcatggtcccacagtatggatacctcaccctgaacaacgggagtcaggcggtaggacgctcttccttttactgcctggagtactttccttctcagatgcttcgtaccggaaacaactttaccttcagctacacctttgaagacgtgcctttccacagtagctacgctcacagccagagtctggatcggctgatgaatcctcttatcgaccagtacctgtattatctaaacaaaacacaatcaaatagtggaactcttcagcagtctcggctactgtttagtcaagctggacccaccagcatgtctcttcaagctaaaaactggctgcctggaccttgctacagacaacagcgtctgtcaaagcaggcaaacgacaacaacaacagcaactttccctggactgcggctacaaagtatcatctaaatggccgggactcgttggttaatccaggaccagctatggccagccacaaagacgatgaagaaaagtttttccccatgcatggaaccctgatatttggtaaacaaggaacaaatgctaacgacgcggatttggacaatgtcatgattacagatgaagaagaaatccgcaccaccaatcccgtggctacggagcagtacgggactgtgtcaaataatttgcaaaactcaaatactggtccaactactggaactgtcaatcaccaaggagcgttacctggtatggtgtggcaggatcgagacgtgtacctgcagggacccatttgggccaagattcctcacaccgatggacactttcatccttctccactgatgggaggttttggactcaaacacccgcctcctcagatcatgatcaaaaacactcccgttccagccaatcctcctacaaacttcagttctgccaagtttgcttccttcatcacacagtattccacgggacaagtcagcgtggagattgagtgggagctgcagaaggagaacagcaaacgctggaaccccgagatccagtacacttccaactacaacaaatctgttaatgtggactttactgtgggcactaatggcgtgtattcagagcctcgccccattggcaccagatacctgactcgtaatctgtaa

SEQ ID NO: 2113 - DNA, 2208 bp, Artificial Sequence
  Synthetic Polynucleotide
atggctgccgatggttatcttccagattggctcgaggacactctctctgaaggaataagacagtggtggaagctcaaacctggcccaccaccaccaaagcccgcagagcggcatcaggacgacagcaggggtcttgtgcttcctgggtacaagtacctcggacccctcaacggactcgacaaaggagagccggtcaacgaggcagacgctgcggccctcgagcacgacaaggcctacgaccggcagctcgacagcggagacaacccgtacctcaagtacaaccacgccgacgcggagtttcaggagcgtcttaaagaagatacgtcttttgggggcaacctcggacgagcagtcttccaggcgaaaaagagggttcttgaacctctgggcctggttgaggaacctgttaagacggctccgggaaaaaagaggccggtagagcactctcctgcggagccagactcctcctcgggaaccggaaaagcgggccagcagcctgcaagaaagagattgaatttcggtcagactggagacgcagactccgtacctgacccccagcctctcggacagccaccagcagcccccacaagtttgggatctactacaatggctacaggcagtggcgcaccaatggcagacaataacgagggtgccgatggagtgggtaattcctcaggaaattggcattgcgattcccaatggctgggcgacagagtcatcaccaccagcacccgaacctgggccctgcccacctacaacaaccacctctacaagcaaatctccagccaatcaggagcatcgaacgacaaccactactttggctacagcaccccttgggggtattttgacttcaacagattccactgtcacttctccccacgtgactggcaaagactcatcaacaacaactggggattccgacccaagagactcaacttcaagctctttaacattcaagtcaaagaggtcacgcagaatgacggtacgacgacgattgccaataaccttaccagcacggttcaggtgtttactgactcggagtaccagctcccgtacgtcctcggctcggcgcatcaaggatgcctcccgccgtttccagcggacgtcttcatggtcccacagtatggatacctcaccctgaacaacgggagtcaggcggtaggacgctcttccttttactgcctggagtactttccttctcagatgctgcgtaccggaaacaactttaccttcagctacacctttgaggacgtgcctttccacagcagctacgctcacagccagagtttggaccggctgatgaatcctctgatcgaccagtatctgtattatctgaacaggacacaatcaaatagtggaactcttcagcagtctaggctactgtttagccaagctggacccaccagcatgtctcttcaagctaaaaactggctgcctggaccttgctacagacagcagcgtctgtcaaagcaggcaaacgacaacaacaacagcaactttccctggactgcggctacaaagtatcatctaaatggtcgggactcgttggttaatccaggaccagctatggccagccacaaagacgatgaagaaaagtttttccccatgcatggaaccctgatatttggtaaacaaggaacaaatgctaacgacgcggatttggaacatgtcatgattacagatgaagaagaaatcaggaccaccaatcccgtggctacagagcagtacggaaacgtgtcaaataatttgcaaaactcaaatactggtccaactacagaaaatgtcaatcaccagggagcgttacctggtatggtgtggcaggatcgagacgtgtacctgcagggacccatttgggccaagattcctcacaccgacggacactttcacccttctccactgatgggaggttttggactcaaacacccgcctcctcaaatcatgatcaaaaacactcctgttccagccaatcctcctacaaacttcagcgcggcaaagtttgcttccttcatcacacagtattccacgggacaggtcagcgtggagatcgagtgggagctgcagaaggagaacagcaaacgctggaaccccgagatccagtacacttccaactacaacaaatctgttaatgtggactttactgtggacactaatggtgtgtattcagagcctcgccccattggcaccagatacctgactcgtaatctgtaa

SEQ ID NO: 2114 - DNA, 2208 bp, Artificial Sequence
  Synthetic Polynucleotide
atggctgccgatggttatcttccagattggctcgaggacactctctctgaaggaataagacagtggtggaagctcaaacctggcccaccaccaccaaagcccgcagagcggcatcaggacgacagcaggggtcttgtgcttcctgggtacaagtacctcggacccttcaacggactcgacaaaggagagccggtcaacgaggcagacgctgcggccctcgagcacgacaaggcctacgaccggcagctcgacagcggagacaacccgtacctcaagtacaaccacgccgacgcggagtttcaggagcgtcttaaagaagatacgtcttttgggggcaacctcggacgagcagtcttccaggcgaaaaagagggttcttgaacctctgggcctggttgaggaacctgttaagacggctccgggaaaaaagaggccggtagagcactctcctgcggagccagactcctcctcgggaaccggaaaagcgggccagcagcctgcaagaaagagattgaatttcggtcagactggagacgcagactccgtacctgacccccagcctctcggacagccaccagcagcccccacaagtttgggatctactacaatggctacaggcagtggcgcaccaatggcagacaataacgagggtgccgatggagtgggtaattcctcaggaaattggcattgcgattcccaatggctgggcgacagagtcatcaccaccagcacccgaacctgggccctgcccacctacaacaaccacctctacaagcaaatctccagccaatcaggagcatcgaacgacaaccactactttggctacagcaccccttgggggtattttgacttcaacagattccactgtcacttctccccacgtgactggcaaagactcatcaacaacaactggggattccgacccaagagactcaacttcaagctctttaacattcaagtcaaagaggtcacgcagaatgacggtacgacgacgattgccaataaccttaccagcacgattcaggtgtttactgactcggagtaccagctcccgtacgtcctcggctcggcgcatcaaggatgcctcccgccgtttccagcggacgtcttcatggtcccacagtatggatacctcaccctgaacaacgggagtcaggcggtaggacgctcttccttttactgcctggagtactttccttctcagatgctgcgtaccggaaacaactttaccttcagctacacctttgaggacgtgcctttccacagcagctacgctcacagccagagtttggaccggctgatgaatcctctgatcgaccagtatctgtattatctgaacaggacacaatcaaatagtggaactcttcagcagtctaggctactgtttagccaagctggacccaccagcatgtctcttcaagctaaaaactggctgcctggaccttgctacagacagcagcgtctgtcaaagcaggcaaacgacaacaacaacagcaactttccctggactgcggctacaaagtatcatctaaatggtcgggactcgttggttaatccaggaccagctatggccagccacaaagacgatgaagaaaagtttttccccatgcatggaaccctgatatttggtaaacaaggaacaaatgctaacgacgcggatttggaacatgtcatgattacagatgaagaagaaatcaggaccaccaatcccgtggctacagagcagtacggaaacgtgtcaaataatttgcaaaactcaaatactggtccaactacagaaaatgtcaatcaccagggagcgttacctggtatggtgtggcaggatcgagacgtgtacctgcagggacccatttgggccaagattcctcacaccgacggacactttcacccttctccactgatgggaggttttggactcaaacacccgcctcctcaaatcatgatcaaaaacactcctgttccagccaatcctcctacaaacttcagcgcggcaaagtttgcttccttcatcacacagtattccacgggacaggtcagcgtggagatcgagtgggagctgcagaaggagaacagcaaacgctggaaccccgagatccagtacacttccaactacaacaaatctgttaatgtggactttactgtggacactaatggtgtgtattcagagcctcgccccattggcaccagatacctgactcgtaatctgtaa

SEQ ID NO: 2115 - DNA, 2208 bp, Artificial Sequence
  Synthetic Polynucleotide
atggctgccgatggttatcttccagattggctcgaggacactctctctgaaggaataagacagtggtggaagctcaaacctggcccaccaccaccaaagcccgcagagcggcatcaggacgacagcaggggtcttgtgcttcctgggtacaagtacctcggacccttcaacggactcgacaaaggagagccggtcaacgaggcagacgctgcggccctcgagcacgacaaggcctacgaccggcagctcgacagcggagacaacccgtacctcaagtacaaccacgccgacgcggagtttcaggagcgtcttaaagaagatacgtcttttgggggcaacctcggacgagcagtcttccaggcgaaaaagagggttcttgaacctctgggcctggttgaggaacctgttaagacggctccgggaaaaaagaggccggtagggcactctcctgcggagccagactcctcctcgggaaccggaaaagcgggccagcagcctgcaagaaagagattgaatttcggtcagactggagacgcagactccgtacctgacccccagcctctcggacagccaccagcagcccccacaagtttgggatctactacaatggctacaggcagtggcgcaccaatggcagacaataacgagggtgccgatggagtgggtaattcctcaggaaattggcattgcgattcccaatggctgggcgacagagtcatcaccaccagcacccgaacctgggccctgcccacctacaacaaccacctctacaagcaaatctccagccaatcaggagcatcgaacgacaaccactactttggctacagcaccccttgggggtattttgacttcaacagattccactgtcacttctccccacgtgactggcaaagactcatcaacaacaactggggattccgacccaagagactcaacttcaagctctttaacattcaagtcaaagaggtcacgcagaatgacggtacgacgacgattgccaataaccttaccagcacggttcaggtgtttactgactcggagtaccagctcccgtacgtcctcggctcggcgcatcaaggatgcctcccgccgtttccagcggacgtcttcatggtcccacagtatggatacctcaccctgaacaacgggagtcaggcggtaggacgctcttccttttactgcctggagtactttccttctcagatgctgcgtaccggaaacaactttaccttcagctacacctttgaggacgtgcctttccacagcagctacgctcacagccagagtttggaccggctgatgaatcctctgatcgaccagtatctgtattatctgaacaggacacaatcaaatagtggaactcttcagcagtctaggctactgtttagccaagctggacccaccagcatgtctcttcaagctaaaaactggctgcctggaccttgctacagacagcagcgtctgtcaaagcaggcaaacgacaacaacaacagcaactttccctggactgcggctacaaagtatcatctaaatggtcgggactcgttggttaatccaggaccagctatggccagccacaaagacgatgaagaaaagtttttccccatgcatggaaccctgatatttggtaaacaaggaacaaatgctaacgacgcggatttggaacatgtcatgattacagatgaagaagaaatcaggaccaccaatcccgtggctacagagcagtacggaaacgtgtcaaataatttgcaaaactcaaatactggtccaactacagaaaatgtcaatcaccagggagcgttacctggtatggtgtggcaggatcgagacgtgtacctgcagggacccatttgggccaagattcctcacaccgacggacactttcacccttctccactgatgggaggttttggactcaaacacccgcctcctcaaatcatgatcaaaaacactcctgttccagccaatcctcctacaaacttcagcgcggcaaagtttgcttccttcatcacacagtattccacgggacaggtcagcgtggagatcgagtgggagctgcagaaggagaacagcaaacgctggaaccccgagatccagtacacttccaactacaacaaatctgttaatgtggactttactgtggacactaatggtgtgtattcagagcctcgccccattggcaccagatacctgactcgtaatctgtaa

SEQ ID NO: 2116 - DNA, 2208 bp, Artificial Sequence
  Synthetic Polynucleotide
atggctgccgatggttatcttccagattggctcgaggacactctctctgaaggaataagacagtggtggaagctcaaacctggcccaccaccaccaaagcccgcagagcggcatcaggacgacagcaggggtcttgtgcttcctgggtacaagtacctcggacccttcaacggactcgacaaaggagagccggtcaacgaggcagacgctgcggccctcgagcacgacaaggcctacgaccggcagctcgacagcggagacaacccgtacctcaagtacaaccacgccgacgcggagtttcaggagcgtcttaaagaagatacgtcttttgggggcaacctcggacgagcagtcttccaggcgaaaaagagggttcttgaacctctgggcctggttgaggaacctgttaagacggctccgggaaaaaagaggccggtagagcactctcctgcggagccagactcctcctcgggaaccggaaaagcgggccagcagcctgcaagaaagagattgaatttcggtcagactggagacgcagactccgtacctgacccccagcctctcggacagccaccagcagcccccacaagtttgggatctactacaatggctacaggcagtggcgcaccaatggcagacaataacgagggtgccgatggagtgggtaattcctcaggaaattggcattgcgattcccaatggctgggcgacagagtcatcaccaccagcacccgaacctgggccctgcccacctacaacaaccacctctacaagcaaatctccagccaatcaggagcatcgaacgacaaccactactttggctacagcaccccttgggggtattttgacttcaacagattccactgtcacttctccccacgtgactggcaaagactcatcaacaacaactggggattccgacccaagagactcaacttcaagctctttaacattcaagtcaaagaggtcacgcagaatgacggtacgacgacgattgccaataaccttaccagcacggttcaggtgtttactgactcggagtaccagctcccgtacgtcctcggctcggcgcatcaaggatgcctcccgccgtttccagcggacgtcttcatggtcccacagtatggatacctcaccctgaacaacgggagtcaggcggtaggacgctcttccttttactgcctggagtactttccttctcagatgctgcgtaccggaaacaactttaccttcagctacacctttgaggacgtgcctttccacagcagctacgctcacagccagagtttggaccggctgatgaatcctctgatcgaccagtatctgtattatctgaacaggacacaatcaaatagtggaactcttcagcagtctaggctactgtttagccaagctggacccaccagcatgtctcttcaagctaaaaactggctgcctggaccttgctacagacagcagcgtctgtcaaagcaggcaaacgacaacaacaacagcaactttccctggactgcggctacaaagtatcatctaaatggtcgggactcgttggttaatccaggaccagctatggccagccacaaagacgatgaagaaaagtttttccccatgcatggaaccctgatatttggtaaacaaggaacaaatgctaacgacgcggatttggaacatgtcatgattacagatgaagaagaaatcaggaccaccaatcccgtggctacagagcagtacggaaacgtgtcaaataatttgcaaaactcaaatactggtccaactacagaaaatgtcaatcaccagggagcgttacctggtatggtgtggcaggatcgagacgtgtacctgcagggacccatttgggccaagattcctcacaccgacggacactttcacccttctccactgatgggaggttttggactcaaacacccgcctcctcaaatcatgatcaaaaacactcctgttccagccaatcctcctacaaacttcagcgcggcaaagtttgcttccttcatcacacagtattccacgggacaggtcagcgtggagatcgagcgggagctgcagaaggagaacagcaaacgctggaaccccgagatccagtacacttccaactacaacaaatctgttaatgtggactttactgtggacactaatggtgtgtattcagagcctcgccccattggcaccagatacctgactcgtaatctgtaa

SEQ ID NO: 2117 - DNA, 2208 bp, Artificial Sequence
  Synthetic Polynucleotide
atggctgccgatggttatcttccagattggctcgaggacactctctctgaaggaataagacagtggtggaagctcaaacctggcccaccaccaccaaagcccgcagagcggcatcaggacgacagcaggggtcttgtgcttcctgggtacaagtacctcggacccttcaacggactcgacaaaggagagccggtcaacgaggcagacgctgcggccctcgagcacgacaaggcctacgaccggcagctcgacagcggagacaacccgtacctcaagtacaaccacgccgacgcggagtttcaggagcgtcttaaagaagatacgtcttttgggggcaacctcggacgagcagtcttccaggcgaaaaagagggttcttgaacctctgggcctggttgaggaacctgttaagacggctccgggaaaaaagaggccggtagagcactctcctgcggagccagactcctcctcgggaaccggaaaagcgggccagcagcctgcaagaaagagattgaatttcggtcagactggagacgcagactccgtacctgacccccagcctctcggacagccaccagcagcccccacaagtttgggatctactacaatggctacaggcagtggcgcaccaatggcagacaataacgagggtgccgatggagtgggtaattcctcaggaaattggcattgcgattcccaatggctgggcgacagagtcatcaccaccagcacccgaacctgggccctgcccacctacaacaaccacctctacaagcaaatctccagccaatcaggagcatcgaacgacaaccactactttggctacagcaccccttgggggtattttgacttcaacagattccactgtcacttctccccacgtgactggcaaagactcatcaacaacaactggggattccgacccaagagactcaacttcaagctctttaacattcaagtcaaagaggtcacgcagaatgacggtacgacgacgattgccaataaccttaccagcacggttcaggtgtttactgactcggagtaccagctcccgtacgtcctcggctcggcgcatcaaggatgcctcccgccgtttccagcggacgtcttcatggtcccacagtatggatacctcaccctgaacaacgggagtcaggcggtaggacgctcttccttttactgcctggagtactttccttctcagatgctgcgtaccggaaacaactttaccttcagctacacctttgaggacgtgcctttccacagcagctacgctcacagccagagtttggaccggctgatgaatcctctgatcgaccagtatctgtattatctgaacaggacacaatcaaatagtggaactcttcagcagtctaggctactgtttagccaagctggacccaccagcatgtctcttcaagctaaaaactggctgcctggaccttgctacagacagcagcgtctgtcaaagcaggcaaacgacaacaacaacagcaactttccctggactgcggctacaaagtatcatctaaatggtcgggactcgttggttaatccaggaccagctatggccagccacaaagacgatgaagaaaagtttttccccatgcatggaaccctgatatttggtaaacaaggaacaaatgctaacgacgcggatttggaacatgtcatgattacagatgaagaagaaatcaggaccaccaatcccgtggctacagagcagtacggaaacgtgtcaaataatttgcaaaactcaaatactggtccaactacagaaaatgtcaatcaccagggagcgttacctggtatggtgtggcaggatcgagacgtgtacctgcagggacccatttgggccaagattcctcacaccgacggacactttcacccttctccactgatgggaggttttggactcaaacacccgcctcctcaaatcatgatcaaaaacactcctgttccagccaatcctcctacaaacttcagcgcggcaaagtttgcttccttcatcacacagtattccacgggacaggtcagcgtggagatcgagtgggagctgcagaaggagaacagcaaacgctggaaccccgagatccagtacacttccaactacaacaaatctgttaatgtggaccttactgtggacactaatggtgtgtattcagagcctcgccccattggcaccagatacctgactcgtaatctgtaa

SEQ ID NO: 2118 - DNA, 2208 bp, Artificial Sequence
  Synthetic Polynucleotide
atggctgccgatggttatcttccagattggctcgaggacactctctctgaaggaataagacagtggtggaagctcaaacctggcccaccaccgccaaagcccgcagagcggcacaaggacgacagtaggggtcttgtgcttcctgggtacaagtacctcggacccttcaacggactcgacaaaggagagccggtcaacgaggcagacgccgcggccctcgagcacgacaaggcctacgaccggcagctcgacagcggagacaacccgtacctcaagtacaaccacgccgacgcggagtttcaggagcgtcttaaagaagatacgtcttttgggggcaacctcggacgagcagtattccaggcgaaaaagagggttcttgaacctctgggcctggttgaggagcctgttaagacggctccgggaaaaaagaggccggtagagcactctcctgtggagccagactcctcctcgggaaccggaaaagcgggccagcagcctgcaagaaaaagattgaattttggtcagactggagacgcagactccgtacctgacccccagcctctcggacagccaccagcagcccccacaagtttgggatctactacaatggctacaggcagtggcgcaccaatggcagacaataacgagggtgccgatggagtgggtaattcctcaggaaattggcattgcgattcccaatggctgggcgacagagtcatcaccaccagcacccgaacctgggccctgcccacctacaacaaccacctctacaagcaaatctccagccaatcaggagcatcgaacgacaaccactactttggccacagcaccccttgggggtattttgacttcaacagattccactgtcacttctccccacgtgactggcaaagactcatcaacaacaactggggattccgacccaagagactcaacttcaagctctttaacattcaagtcaaagaggtcacgcagaatgacggtacgacgacgattgccaataaccttaccagcacggttcaggtgtttactgactcggagtaccagctcccgtacgtcctcggctcggcgcatcaaggatgcctcccgccgttcccagcagacgtcttcatggtcccacagtatggatacctcaccctgaacaacgggagtcaggcggtaggacgctcttccttttactgcctggagtactttccttctcagatgcttcgtaccggaaacaactttaccttcagctacacctttgaagacgtgcctttccacagtagctacgctcacagccagagtctggatcggctgatgaatcctcttatcgaccagtacctgtattatctaaacaaaacacaatcaaatagtggaactcttcagcagtctcggctactgtttagtcaagctggacccaccagcatgtctcttcaagctaaaaactggctgcctggaccttgctacagacaacagcgtctgtcaaagcaggcaaacgacaacaacaacagcaactttccctggactgcggctacaaagtatcatctaaatggccgggactcgttggttaatccaggaccagctatggccagccacaaagacgatgaagaaaagtttttccccatgcatggaaccctgatatttggtaaacaaggaacaaatgctaacgacgcggatttggacaatgtcatgattacagatgaagaagaaatccgcaccaccaatcccgtggctacggagcagtacgggactgtgtcaaataatttgcaaaactcaaatactggtccaactactggaactgtcaatcaccaaggagcgttacctggtatggtgtggcaggatcgagacgtgtacctgcagggacccatttgggccaagattcctcacaccgatggacactttcatccttctccactgatgggaggttttggactcaaacacccgcctcctcagatcatgatcaaaaacactcccgttccagccaatcctcctacaaacttcagttctgccaagtttgcttccttcatcacacagtattccacgggacaagtcagcgtggagattgagtgggagctgcagaaggagaacagcaaacgctggaaccccgagatccagtacacttccaactacaacaaatctgttaatgtggactttactgtggacactaatggcgtgtattcagagcctcgccccattggcaccagatacctgactcgtaatctgtaa

SEQ ID NO: 2119 - DNA, 2208 bp, Artificial Sequence
  Synthetic Polynucleotide
atggctgccgatggttatcttccagattggctcgaggacactctctctgaaggaataagacagtggtggaagctcaaacctggcccaccaccgccaaagcccgcagagcggcacaaggacgacagtaggggtcttgtgcttcctgggtacaagtacctcggacccttcaacggactcgacaaaggagagccggtcaacgaggcagacgccgcggccctcgagcacgacaaggcctacgaccggcagctcgacagcggagacaacccgtacctcaagtacaaccacgccgacgcggagtttcaggagcgtcttaaagaagatacgtcttttgggggcaacctcggacgagcagtattccaggcgaaaaagagggttcttgaacctctgggcctggttgaggagcctgttaagacggctccgggaaaaaagaggccggtagagcactctcctgtggagccagactcctcctcgggaaccggaaaagcgggccagcagcctgcaagaaaaagattgaattttggtcagactggagacgcagactccgtacctgacccccagcctctcggacagccaccagcagcccccacaagtttgggatctactacaatggctacaggcagtggcgcaccaatggcagacaataacgagggtgccgatggagtgggtaattcctcaggaaattggcattgcgattcccaatggctgggcgacagagtcatcaccaccagcacccgaacctgggccctgcccacctacaacaaccacctctacaagcaaatctccagccaatcaggagcaccgaacgacaaccactactttggccacagcaccccttgggggtattttgacttcaacagattccactgtcacttctccccacgtgactggcaaagactcatcaacaacaactggggattccgacccaagagactcaacttcaagctctttaacattcaagtcaaagaggtcacgcagaatgacggtacgacgacgattgccaataaccttaccagcacggttcaggtgtttactgactcggagtaccagctcccgtacgtcctcggctcggcgcatcaaggatgcctcccgccgttcccagcagacgtcttcatggtcccacagtatggatacctcaccctgaacaacgggagccaggcggtaggacgctcttccttttactgcctggagtactttccttctcagatgcttcgtaccggaaacaactttaccttcagctacacctttgaagacgtgcctttccacagtagctacgctcacagccagagtctggatcggctgatgaatcctcttatcgaccagtacctgtattatctaaacaaaacacaatcaaatagtggaactcttcagcagtctcggctactgtttagtcaagctggacccaccagcatgtctcttcaagctaaaaactggctgcctggaccttgctacagacaacagcgtctgtcaaagcaggcaaacgacaacaacaacagcaactttccctggactgcggctacaaagtatcatctaaatggccgggactcgttggttaatccaggaccagctatggccagccacaaagacgatgaagaaaagtttttccccatgcatggaaccctgatatttggtaaacaaggaacaaatgctaacgacgcggatttggacaatgtcatgattacagatgaagaagaaatccgcaccaccaatcccgtggctacggagcagtacgggactgtgtcaaataatttgcaaaactcaaatactggtccaactactggaactgtcaatcaccaaggagcgttacctggtatggtgtggcaggatcgagacgtgtacctgcagggacccatttgggccaagattcctcacaccgatggacactttcatccttctccactgatgggaggttttggactcaaacacccgcctcctcagatcatgatcaaaaacactcccgttccagccaatcctcctacaaacttcagttctgccaagtttgcttccttcatcacacagtattccacgggacaagtcagcgtggagattgagtgggagctgcagaaggagaacagcaaacgctggaaccccgagatccagtacacttccaactacaacaaatctgttaatgtggactttactgtggacactaatggcgtgtattcagagcctcgccccattggcaccagatacctgactcgtaatctgtaa

SEQ ID NO: 2120 - DNA, 2208 bp, Artificial Sequence
  Synthetic Polynucleotide
atggctgccgatggttatcttccagattggctcgaggacactctctctgaaggaataagacagtggtggaagctcaaacctggcccaccaccgccaaagcccgcagagcggcacaaggacgacagtaggggtcttgtgcttcctgggtacaagtacctcggacccttcaacggactcgacaaaggagagccggtcaacgaggcagacgccgcggccctcgagcacgacaaggcctacgaccggcagctcgacagcggagacaacccgtacctcaagtacaaccacgccgacgcggagtttcaggagcgtcttaaagaagatacgtcttttgggggcaacctcggacgagcagtattccaggcgaaaaagagggttcttgaacctctgggcctggttgaggagcctgttaagacggctccgggaaaaaagaggccggtagagcactctcctgtggagccagactcctcctcgggaaccggaaaagcgggccagcagcctgcaagaaaaagattgaattttggtcagactggagacgcagactccgtacctgacccccagcctctcggacagccaccagcagcccccacaagtttgggatctactacaatggctacaggcagtggcgcaccaatggcagacaataacgagggtgccgatggagtgggtaattcctcaggaaattggcattgcgattcccaatggctgggcgacagagtcatcaccaccagcacccgaacctgggccctgcccacctacaacaaccacctctacaagcaaatctccagccaatcaggagcatcgaacgacaaccactactttggccacagcaccccttgggggtattttgacttcaacagattccactgtcacttctccccacgtgactggcaaagactcatcaacaacaactggggattccgacccaagagactcaacttcaagctctttaacattcaagtcaaagaggtcacgcagaatgacggtacgacgacgattgccaataaccttaccagcacggttcaggtgtttactgactcggagtaccagctcccgtacgtcctcggctcggcgcatcaaggatgcctcccgccgttcccagcagacgtcttcatggtcccacagtatggatacctcaccctgaacaacgggagtcaggcggtaggacgctcttccttttactgcctggagtactttccttctcagatgcttcgtaccggaaacaactttaccttcagctacacctttgaagacgtgcctttccacagtagctacgctcacagccagagtctggatcggctgatgaatcctcttatcgaccagtacctgtattatctaaacaaaacacaatcaaatagtggaactcttcagcagtctcggctactgtttagtcaagctggacccaccagcatgtctcttcaagctaaaaactggctgcctggaccttgctacagacaacagcgtctgtcaaagcaggcaaacgacaacaacaacagcaactttccctggactgcggctacaaagtatcatctaaatggccgggactcgttggttaatccaggaccagctatggccagccacaaagacgatgaagaaaagtttttccccatgcatggaaccctgatatttggtaaacaaggaacaaatgctaacgacgcggatttggacaatgtcatgattacagatgaagaagaaatccgcaccaccaatcccgtggctacggagcagtacgggactgtgtcaaataatttgcaaaactcaaatactggtccaactactggaactgtcaatcaccaaggagcgttacctggtatggtgtggcaggatcgagacgtgtacctgcagggacccatttgggccaagattcctcacaccgatggacactttcatccttctccactgatgggaggttttggactcaaacacccgcctcctcagatcatgatcaaaaacactcccgttccagccaatcctcctacaaacttcagttctgccaagtttgcttccttcatcacacagtattccacaggacaagtcggcgtggagattgagtgggagctgcagaaggagaacagcaaacgctggaaccccgagatccagtacacttccaactacaacaaatctgttaatgtggactttactgtggacactaatggcgtgtattcagagcctcgccccattggcaccagatacctgactcgtaatctgtaa

SEQ ID NO: 2121 - DNA, 2208 bp, Artificial Sequence
  Synthetic Polynucleotide
atggctgccgatggttatcttccagattggctcgaggacactctctctgaaggaataagacagtggtggaagctcaaacctggcccaccaccgccaaagcccgcagagcggcacaaggacgacagtaggggtcttgtgcttcctgggtacaagtacctcggacccttcaacggactcgacaaaggagagccggtcaacgaggcagacgccgcggccctcgagcacgacaaggcctacgaccggcagctcgacagcggagacaacccgtacctcaagtacaaccacgccgacgcggagtttcaggagcgtcttaaagaagatacgtcttttgggggcaacctcggacgagcagtattccaggcgaaaaagagggttcttgaacctctgggcctggttgaggagcctgttaagacggctccgggaaaaaagaggccggtagagcactctcctgtggagccagactcctcctcgggaaccggaaaagcgggccagcagcctgcaagaaaaagattgaattttggtcagactggagacgcagactccgtacctgacccccagcctctcggacagccaccagcagcccccacaagtttgggatctactacaatggctacaggcagtggcgcaccaatggcagacaataacgagggtgccgatggagtgggtaattcctcaggaaattggcattgcgattcccaatggctgggcgacagagtcatcaccaccagcacccgaacctgggccctgcccacctacaacaaccacctctacaagcaaatctccagccaatcaggagcatcgaacgacaaccactactttggccacagcaccccttgggggtattttgacttcaacagattccactgtcacttctccccacgtgactggcaaagactcatcaacaacaactggggattccgacccaagagactcaacttcaagctctttaacattcaagtcaaagaggtcacgcagaatgacggtacgacgacgattgccaataaccttaccagcacggttcaggtgtttactgactcggagtaccagctcccgtacgtcctcggctcggcgcatcaaggatgcctcccgccgttcccagcagacgtcttcatggtcccacagtatggatacctcaccctgaacaacgggagtcaggcggtaggacgctcttccttttactgcctggagtactttccttctcagatgcttcgtaccggaaacaactttaccttcagctacacctttgaagacgtgcctttccacagtagctacgctcacagccagagtctggatcggctgatgaatcctcttatcgaccagtacctgtattatctaaacaaaacaaacaatcaaagtggaaccttcacgcagtctcggctactgtttagtcaagctggacccaccagcattctcttcaagtctaaaaactggctgcctggaccttgctacagacaacagcgtctgtcaaagcgggcaaacgacaacaacaacagcaactttccctggactgcggctacaaagtatcatctaaatggccgggactcgttggttaatccaggaccagctatggccagccacaaagacgatgaagaaaagttttttccccagcatggaaccctgatatttggtaaacaaggaacaaagctaacagacgcggatttggacaatgtcatgattacagatgaagaagaaatccgcaccaccaatcccgtggctacggagcagtacgggactgtgtcaaataatttgcagaaactcaacatactggcaactactggaactgtcaacacacaaggagcgttacctggtatggtgtggcaggatcgagacgtgtacctgcagggacccatttgggccaagattcctcacaccgatggacactttcatccttctccactgatgggaggttttggactcaaacacccgcctcctcagatcatgatcaaaaacactcccgttccagccaatcctcctacaaacttcagttctgccaagtttgcttccttcatcacacagtattccacgggacaagtcagcgtggagattgagtgggagctgcagaaggagaacagcaaacgctggaaccccgagatccagtacacttccaactacaacaaatctgttaatgtggactttactgtggacactaatggcgtgtattcagagcctcgccccattggcaccagatacctgactcgtaatctgtaa

SEQ ID NO: 2122 - DNA, 2208 bp, Artificial Sequence
  Synthetic Polynucleotide
atggctgccgatggttatcttccagattggctcgaggacactctctctgaaggaataagacagtggtggaagctcaaacctggcccaccaccgccaaagcccgcagagcggcacaaggacgccagtaggggtcttgtgcttcctgggtacaagtacctcggacccttcaacggactcgacaaaggagagccggtcaacgaggcagacgccgcggccctcgagcacgacaaggcctacgaccggcagctcgacagcggagacaacccgtacctcaagtacaaccacgccgacgcggagtttcaggagcgtcttaaagaagatacgtcttttgggggcaacctcggacgagcagtattccaggcgaaaaagagggttcttgaacctctgggcctggttgaggagcctgttaagacggctccgggaaaaaagaggccggtagagcactctcctgtggagccagactcctcctcgggaaccggaaaagcgggccagcagcctgcaagaaaaagattgaattttggtcagactggagacgcagactccgtacctgacccccagcctctcggacagccaccagcagcccccacaagtttgggatctactacaatggctacaggcagtggcgcaccaatggcagacaataacgagggtgccgatggagtgggtaattcctcaggaaattggcattgcgattcccaatggctgggcgacagagtcatcaccaccagcacccgaacctgggccctgcccacctacaacaaccacctctacaagcaaatctccagccaatcaggagcatcgaacgacaaccactactttggctacagcaccccttgggggtattttgacttcaacagattccactgtcacttctccccacgtgactggcaaagactcatcaacaacaactggggattccgacccaagagactcaacttcaagctctttaacattcaagtcaaagaggtcacgcagaatgacggtacgacgacgattgccaataaccttaccagcacggttcaggtgtttactgactcggagtaccagctcccgtacgtcctcggctcggcgcatcaaggatgcctcccgccgttcccagcagacgtcttcatggtcccacagtatggatacctcaccctgaacaacgggagtcaggcggtaggacgctcttccttttactgcctggagtactttccttctcagatgcttcgtaccggaaacaactttaccttcagctacacctttgaagacgtgcctttccacagtagctacgctcacagccagagtctggatcggctgatgaatcctcttatcgaccagtacctgtattatctaaacaaaacaaacaatcaaagtggaaccttcacgcagtctcggctactgtttagtcaagctggacccaccagcattctcttcaagtctaaaaactggctgcctggaccttgctacagacaacagcgtctgtcaaagacagcaaacgacaacaacaacagcaactttccctggactgcggctacaaagtatcatctaaatggccgggactcgttggttaatccaggaccagctatggccagccacaaagacgatgaagaaaagttttttccccagcatggaaccctgatatttggtaaacaaggaacaaagctaacagacgcggatttggacaatgtcatgattacagatgaagaagaaatccgcaccaccaatcccgtggctacggagcagtacgggactgtgtcaaataatttgcagaaactcaacatactggcaactactggaactgtcaacacacaaggagcgttacctggtatggtgtggcaggatcgagacgtgtacctgcagggacccatttgggccaagattcctcacaccgatggacactttcatccttctccactgatgggaggttttggactcaaacacccgcctcctcagatcatgatcaaaaacactcccgttccagccaatcctcctacaaacttcagttctgccaagtttgcttccttcatcacacagtattccacgggacaagtcagcgtggagattgagtgggagctgcagaaggagaacagcaaacgctggaaccccgagatccagtacacttccaactacaacaaatctgttaatgtggactttactgtggacactaatggcgtgtattcagagcctcgccccattggcaccagatacctgactcgtaatctgtaa

SEQ ID NO: 2123 - DNA, 2208 bp, Artificial Sequence
  Synthetic Polynucleotide
atggctgccgatggttatcttccagattggctcgaggacactctctctgaaggaataagacagtggtggaagctcaaacctggcccaccaccgccaaagcccgcagagcggcacaaggacgacagtaggggtcttgtgcttcctgggtacaagtacctcggacccttcaacggactcgacaaaggagagccggtcaacgaggcagacgccgcggccctcgagcacgacaaggcctacgaccggcagctcgacagcggagacaacccgtacctcaagtacaaccacgccgacgcggagtttcaggagcgtcttaaagaagatacgtcttttgggggcaacctcggacgagcagtattccaggcgaaaaagagggttcttgaacctctgggcctggttgaggagcctgttaagacggctccgggaaaaaagaggccggtagagcactctcctgtggagccagactcctcctcgggaaccggaaaagcgggccagcagcctgcaagaaaaagattgaattttggtcagactggagacgcagactccgtacctgacccccagcctctcggacagccaccagcagcccccacaagtttgggatctactacaatggctacaggcagtggcgcaccaatggcagacaataacgagggtgccgatggagtgggtaattcctcaggaaattggcattgcgattcccaatggctgggcgacagagtcatcaccaccagcacccgaacctgggccctgcccacctacaacaaccacctctacaagcaaatctccagccaatcaggagcatcgaacgacaaccactactttggccacagcaccccttgggggtattttgacttcaacagattccactgtcacttctccccacgtgactggcaaagactcatcaacaacaactggggattccgacccaagagactcaacttcaagctctttaacattcaagtcaaagaggtcacgcagaatgacggtacgacgacgattgccaataaccttaccagcacggttcaggtgtttactgactcggagtaccagctcccgtacgtcctcggctcggcgcatcaaggatgcctcccgccgttcccagcagacgtcttcatggtcccacagtatggatacctcaccctgaacaacgggagtcaggcggtaggacgctcttccttttactgcctggagtactttccttctcagatgcttcgtaccggaaacaactttaccttcagctacacctttgaagacgtgcctttccacagtagctacgctcacagccagagtctggatcggctgatgaatcctcttatcgaccagtacctgtattatctaaacaaaacaaacaatcaaagtggaaccttcacgcagtctcggctactgtttagtcaagctggacccaccagcattctcttcaagtctaaaaactggctgcctggaccttgctacagacaacagcgtctgtcaaagacagcaaacgacaacaacaacagcaactttccctggactgcggctacaaagtatcatctaaatggccgggactcgttggttaatccaggaccagctatggccagccacaaagacgatgaagaaaagttttttccccagcatggaaccctgatatttggtaaacaaggaacaaagctaacagacgcggatttggacaatgtcatgattacagatgaagaagaaatccgcaccaccaatcccgtggctacggagcagtacgggactgtgtcaaataatttgcagaaactcaacatactggcaactactggaactgtcaacacacaaggagcgttacctggtatggtgtggcaggatcgagacgtgtacctgcagggacccatttgggccaagattcctcacaccgatggacactttcatccttctccactgatgggaggttttggactcaaacacccgcctcctcagatcatgatcaaaaacactcccgttccagccaatcctcctacaaacttcagttctgccaagtttgcttccttcatcacacagtattccacgggacaagtcagcgtggagattgagtgggagctgcagaaggagaacagcaaacgctggaaccccgagatccagtacacttccaactacaacaaatctgttaatgtggactttactgtggacactaatggcgtgtattcagagcctcgccccattggcaccagatacctgactcgtaatctgtaa

SEQ ID NO: 2124 - DNA, 2208 bp, Artificial Sequence
  Synthetic Polynucleotide
atggctgccgatggttatcttccagattggctcgaggacactctctctgaaggaataagacagtggtggaagctcaaacctggcccaccaccaccaaagcccgcagagcggcatcaggacgacagcaggggtcttgtgcttcctgggtacaagtacctcggacccttcaacggactcgacaaaggagagccggtcaacgaggcagacgctgcggccctcgagcacgacaaggcctacgaccggcagctcgacagcggagacaacccgtacctcaagtacaaccacgccgacgcggagtttcaggagcgtcttaaagaagatacgtcttttgggggcaacctcggacgagcagtcttccaggcgaaaaagagggttcttgaacctctgggcctggttgaggaacctgttaagacggctccgggaaaaaagaggccggtagagcactctcctgcggagccagactcctcctcgggaaccggaaaagcgggccagcagcctgcaagaaagagattgaatttcggtcagactggagacgcagactccgtacctgacccccagcctctcggacagccaccagcagcccccacaagtttgggatctactacaatggctacaggcagtggcgcaccaatggcagacaataacgagggtgccgatggagtgggtaattcctcaggaaattggcattgcgattcccaatggctgggcgacggagtcatcaccaccagcacccgaacctgggccctgcccacctacaacaaccacctctacaagcaaatctccagccaatcaggagcatcgaacgacaaccactactttggctacagcaccccttgggggtattttgacttcaacagattccactgtcacttctccccacgtgactggcaaagactcatcaacaacaactggggattccgacccaagagactcaacttcaagctctttaacattcaagtcaaagaggtcacgcagaatgacggtacgacgacgattgccaataaccttaccagcacggttcaggtgtttactgactcggagtaccagctcccgtacgtcctcggctcggcgcatcaaggatgcctcccgccgtttccagcggacgtcttcatggtcccacagtatggatacctcaccctgaacaacgggagtcaggcggtaggacgctcttccttttactgcctggagtactttccttctcagatgctgcgtaccggaaacaactttaccttcagctacacctttgaggacgtgcctttccacagcagctacgctcacagccagagtttggaccggctgatgaatcctctgatcgaccagtatctgtattatctgaacaggacacaatcaaatagtggaactcttcagcagtctaggctactgtttagccaagctggacccaccagcatgtctcttcaagctaaaaactggctgcctggaccttgctacagacagcagcgtctgtcaaagcaggcaaacgacaacaacaacagcaactttccctggactgcggctacaaagtatcatctaaatggtcgggactcgttggttaatccaggaccagctatggccagccacaaagacgatgaagaaaagtttttccccatgcatggaaccctgatatttggtaaacaaggaacaaatgctaacgacgcggatttggaacatgtcatgattacagatgaagaagaaatcaggaccaccaatcccgtggctacagagcagtacggaaacgtgtcaaataatttgcaaaactcaaatactggtccaactacagaaaatgtcaatcaccagggagcgttacctggtatggtgtggcaggatcgagacgtgtacctgcagggacccatttgggccaagattcctcacaccgacggacactttcacccttctccactgatgggaggttttggactcaaacacccgcctcctcaaatcatgatcaaaaacactcctgttccagccaatcctcctacaaacttcagcgcggcaaagtttgcttccttcatcacacagtattccacgggacaggtcagcgtggagatcgagtgggagctgcagaaggagaacagcaaacgctggaaccccgagatccagtacacttccaactacaacaaatctgttaatgtggactttactgtggacactaatggtgtgtattcagagcctcgccccattggcaccagatacctgactcgtaatctgtaa

SEQ ID NO: 2125 - DNA, 2208 bp, Artificial Sequence
  Synthetic Polynucleotide
atggctgccgatggttatcttccagattggctcgaggacactctctctgaaggaataagacagtggtggaagctcaaacctggcccaccaccaccaaagcccgcagagcggcatcaggacgacagcaggggtcttgtgcttcctgggtacaagtacctcggacccttcaacggactcgacaaaggagagccggtcaacgaggcagacgctgcggccctcgagcacgacaaggcctacgaccggcagctcgacagcggagacaacccgtacctcaagtacaaccacgccgacgcggagtttcaggagcgtcttaaagaagatacgtcttttgggggcaacctcggacgagcagtcttccaggcgaaaaagagggttcttgaacctctgggcctggttgaggaacctgttaagacggctccgggaaaaaagaggccggtagagcactctcctgcggagccagactcctcctcgggaaccggaaaagcgggccagcagcctgcaagaaagagattgaatttcggtcagactggagacgcagactccgtacctgacccccagcctctcggacagccaccagcagcccccacaagtttgggatctactacaatggctacaggcagtggcgcaccaatggcagacaataacgagggtgccgatggagtgggtaattcctcaggaaattggcattgcgattcccaatggctgggcgacagagtcatcaccaccagcacccgaacctgggccctgcccacctacaacaaccacctctacaagcaaatctccagccaatcaggagcatcgaacgacaaccactactttggctacagcaccccttgggggtattttgacttcaacagattccactgtcacttctccccacgtgactggcaaagactcatcaacaacaactggggattccgacccaagagactcaacttcaagctctttaacattcaagtcaaagaggtcacgcagaatgacggtacgacgacgattgccaataaccttaccagcacggttcaggcgtttactgactcggagtaccagctcccgtacgtcctcggctcggcgcatcaaggatgcctcccgccgtttccagcggacgtcttcatggtcccacagtatggatacctcaccctgaacaacgggagtcaggcggtaggacgctcttccttttactgcctggagtactttccttctcagatgctgcgtaccggaaacaactttaccttcagctacacctttgaggacgtgcctttccacagcagctacgctcacagccagagtttggaccggctgatgaatcctctgatcgaccagtatctgtattatctgaacaggacacaatcaaatagtggaactcttcagcagtctaggctactgtttagccaagctggacccaccagcatgtctcttcaagctaaaaactggctgcctggaccttgctacagacagcagcgtctgtcaaagcaggcaaacgacaacaacaacagcaactttccctggactgcggctacaaagtatcatctaaatggtcgggactcgttggttaatccaggaccagctatggccagccacaaagacgatgaagaaaagtttttccccatgcatggaaccctgatatttggtaaacaaggaacaaatgctaacgacgcggatttggaacatgtcatgattacagatgaagaagaaatcaggaccaccaatcccgtggctacagagcagtacggaaacgtgtcaaataatttgcaaaactcaaatactggtccaactacagaaaatgtcaatcaccagggagcgttacctggtatggtgtggcaggatcgagacgtgtacctgcagggacccatttgggccaagattcctcacaccgacggacactttcacccttctccactgatgggaggttttggactcaaacacccgcctcctcaaatcatgatcaaaaacactcctgttccagccaatcctcctacaaacttcagcgcggcaaagtttgcttccttcatcacacagtattccacgggacaggtcagcgtggagatcgagtgggagctgcagaaggagaacagcaaacgctggaaccccgagatccagtacacttccaactacaacaaatctgttaatgtggactttactgtggacactaatggtgtgtattcagagcctcgccccattggcaccagatacctgactcgtaatctgtaa

SEQ ID NO: 2126 - DNA, 2208 bp, Artificial Sequence
  Synthetic Polynucleotide
atggctgccgatggttatcttccagattggctcgaggacactctctctgaaggaataagacagtggtggaagctcaaacctggcccaccaccaccaaagcccgcagagcggcatcaggacgacagcaggggtcttgtgcttcctgggtacaagtacctcggacccttcaacggactcgacaaaggagagccggtcaacgaggcagacgctgcggccctcgagcacgacaaggcctacgaccggcagctcgacagcggagacaacccgtacctcaagtacaaccacgccgacgcggagtttcaggagcgtcttaaagaagatacgtcttttgggggcaacctcggacgagcagtcttccaggcgaaaaagagggttcttgaacctctgggcctggttgaggaacctgttaagacggctccgggaaaaaagaggccggtagagcactctcctgcggagccagactcctcctcgggaaccggaaaagcgggccagcagcctgcaagaaagagattgaatttcggtcagactggagacgcagactccgtacctgacccccagcctctcggacagccaccagcagcccccacaagtttgggatctactacaatggctacaggcagtggcgcaccaatggcagacaataacgagggtgccgatggagtgggtaattcctcaggaaattggcattgcgattcccaatggctgggcgacagagtcatcaccaccagcacccgaacctgggccctgcccacctacaacaaccacctctacaagcaaatctccagccaatcaggagcatcgaacgacaaccactactttggctacagcaccccttgggggtattttgacttcaacagattccactgtcacttctccccacgtgactggcaaagactcatcaacaacaactggggattccgacccaagagactcaacttcaagctctttaacattcaagtcaaagaggtcacgcagaatgacggtacgacgacgattgccaataaccttaccagcacggttcaggtgtttactgactcggagtaccagctcccgtacgtcctcggctcggcgcatcaaggatgcctcccgccgtttccagcggacgtcttcatggtcccacagtatggatacctcaccctgaacaacgggagtcaggcggtaggacgctcttccttttactgcctggagtactttccttctcagatgctgcgtaccggaaacaactttaccttcagctacacctttgaggacgtgcctttccacagcagctacgctcacagccagagtttggaccggctgatgaatcctctgatcgaccagtatctgtattatctgaacaggacacaatcaaatagtggaactcttcagcagtctaggctactgtttagccaagctggacccaccagcatgtctcttcaagctaaaaactggctgcctggaccttgctacagacagcagcgtctgtcaaagcaggcaaacgacaacaacaacagcaactttccctggactgcggctacaaagtatcatctaaatggtcgggactcgttggttaatccaggaccagctatggccagccacaaagacgatgaagaaaagtttttccccatgcatggaaccctgatatttggtaaacaaggaacaaatgctaacgacgcggatttggaacatgtcatgattacagatgaagaagaaatcaggaccaccaatcccgtggctacagagcagtacggaaacgtgtcaaataatttgcaaaactcaaatactggtccaactacagaaaatgtcaatcaccagggagcgttacctggtatggtgtggcaggatcgagacgtgtacctgcagggacccatttgggccaagattcctcacaccgacggacactttcacccttctccactgatgggaggttttggactcaaacacccgcctcctcaaatcatgatcaaaaacactcctgttccagccaatcctcctacaaacttcagcgcggcaaagtttgcttccttcatcacacagtattccacgggacaggtcagcgtggagatcgagtgggagctgcagaaggggaacagcaaacgctggaaccccgagatccagtacacttccaactacaacaaatctgttaatgtggactttactgtggacactaatggtgtgtattcagagcctcgccccattggcaccagatacctgactcgtaatctgtaa

SEQ ID NO: 2127 - DNA, 2208 bp, Artificial Sequence
  Synthetic Polynucleotide
atggctgccgatggttatcttccagattggctcgaggacactctctctgaaggaataagacagtggtggaagctcaaacctggcccaccaccaccaaagcccgcagagcggcatcaggacgacagcaggggtcttgtgcttcctgggtacaagtacctcggacccttcaacggactcgacaaaggagagccggtcaacgaggcagacgctgcggccctcgagcacgacaaggcctacgaccggcagctcgacagcggagacaacccgtacctcaagtacaaccacgccgacgcggagtttcaggagcgtcttaaagaagatacgtcttttgggggcaacctcggacgagcagtcttccaggcgaaaaagagggttcttgaacctctgggcctggttgaggaacctgttaagacggctccgggaaaaaagaggccggtagagcactctcctgcggagccagactcctcctcgggaaccggaaaagcgggccagcagcctgcaagaaagagattgaatttcggtcagactggagacgcagactccgtacctgacccccagcctctcggacagccaccagcagcccccacaagtttgggatctactacaatggctacaggcagtggcgcaccaatggcagacaataacgagggtgccgatggagtgggtaattcctcaggaaattggcattgcgattcccaatggctgggcgacagagtcatcaccaccagcacccgaacctgggccctgcccacctacaacaaccacctctacaagcaaatctccagccaatcaggagcatcgaacgacaaccactactttggctacagcaccccttgggggtattttgacttcaacagattccactgtcacttctccccacgtgactggcaaagactcatcaacaacaactggggattccgacccaagagactcaacttcaagctctttaacattcaagtcaaagaggtcacgcagaatgacggtacgacgacgattgccaataaccttaccagcacggttcaggtgtttactgactcggagtaccagctcccgtacgtcctcggctcggcgcatcaaggatgcctcccgccgtttccagcggacgtcttcatggtcccacagtatggatacctcaccctgaacaacgggagtcaggcggtaggacgctcttccttttactgcctggagtactttccttctcagatgctgcgtaccggaaacaactttaccttcagctacacctttgaggacgtgcctttccacagcagctacgctcacagccagagtttggaccggctgatgaatcctctgatcgaccagtatctgtattatctgaacaggacacaatcaaatagtggaactcttcagcagtctaggctactgtttagccaagctggacccaccagcatgtctcttcaagctaaaaactggctgcctggaccttgctacagacagcagcgtctgtcaaagcaggcaaacgacaacaacaacagcaactttccctggactgcggctacaaagtatcatctaaatggtcgggactcgttggttaatccaggaccagctatggccagccacaaagacgatgaagaaaagtttttccccatgcatggaaccctgatatttggtaaacaaggaacaaatgctaacgacgcggatttggaacatgtcatgattacagatgaagaagaaatcaggaccaccaatcccgtggctacagagcagtacggaaacgtgtcaaataatttgcaaaactcaaatactggtccaactacagaaaatgtcaatcaccagggagcgttacctggtatggtgtggcaggatcgagacgtgtacctgcagggacccatttgggccaagattcctcacaccgacggacactttcacccttctccactgatgggaggttttggactcaaacacccgcctcctcaaatcatgatcaaaaacactcctgttccagccaatcctcctacaaacttcagcgcggcaaagtttgcttccttcatcacacagtattccacgggacaggtcagcgtggagatcgagtgggggctgcagaaggagaacagcaaacgctggaaccccgagatccagtacacttccaactacaacaaatctgttaatgtggactttactgtggacactaatggtgtgtattcagagcctcgccccattggcaccagatacctgactcgtaatctgtaa

SEQ ID NO: 2128 - DNA, 2208 bp, Artificial Sequence
  Synthetic Polynucleotide
atggctgccgatggttatcttccagattggctcgaggacactctctctgaaggaataagacagtggtggaagctcaaacctggcccaccaccaccaaagcccgcagagcggcatcaggacgacagcaggggtcttgtgcttcctgggtacaagtacctcggacccttcaacggactcgacaaaggagagccggtcaacgaggcagacgctgcggccctcgagcacgacaaggcctacgaccggcagctcgacagcggagacaacccgtacctcaagtacaaccacgccgacgcggagtttcaggagcgtcttaaagaagatacgtcttttgggggcaacctcggacgagcagtcttccaggcgaaaaagagggttcttgaacctctgggcctggttgaggaacctgttaagacggctccgggaaaaaagaggccggtagagcactctcctgcggagccagactcctcctcgggaaccggaaaagcgggccagcagcctgcaagaaagagattgaatttcggtcagactggagacgcagactccgtacctgacccccagcctctcggacagccaccagcagcccccacaagtttgggatctactacaatggctacaggcagtggcgcaccaatggcagacaataacgagggtgccgatggagtgggtaattcctcaggaaattggcattgcgattcccaatggctgggcgacagagtcatcaccaccagcacccgaacctgggccctgcccacctacaacaaccacctctacaagcaaatctccagccaatcaggagcatcgaacgacaaccactactttggctacagcaccccttgggggtattttgacttcaacagattccactgtcacttctccccacgtgactggcaaagactcatcaacaacaactggggattccgacccaagagactcaacttcaagctctttaacattcaagtcaaagaggtcacgcagaatgacggtacgacgacgattgccaataaccttaccagcacggttcaggtgtttactgactcggagtaccagctcccgtacgtcctcggctcggcgcatcaaggatgcctcccgccgtttccagcggacgtcttcatggtcccacagtatggatacctcaccctgaacaacgggagtcaggcggtaggacgctcttccttttactgcctggagtactttccttctcagatgctgcgtaccggaaacaactttaccttcagctacacctttgaggacgtgcctttccacagcagctacgctcacagccagagtttggaccggctgatgaatcctctgatcgaccagtatctgtattatctgaacaggacacgatcaaatagtggaactcttcagcagtctaggctactgtttagccaagctggacccaccagcatgtctcttcaagctaaaaactggctgcctggaccttgctacagacagcagcgtctgtcaaagcaggcaaacgacaacaacaacagcaactttccctggactgcggctacaaagtatcatctaaatggtcgggactcgttggttaatccaggaccagctatggccagccacaaagacgatgaagaaaagtttttccccatgcatggaaccctgatatttggtaaacaaggaacaaatgctaacgacgcggatttggaacatgtcatgattacagatgaagaagaaatcaggaccaccaatcccgtggctacagagcagtacggaaacgtgtcaaataatttgcaaaactcaaatactggtccaactacagaaaatgtcaatcaccagggagcgttacctggtatggtgtggcaggatcgagacgtgtacctgcagggacccatttgggccaagattcctcacaccgacggacactttcacccttctccactgatgggaggttttggactcaaacacccgcctcctcaaatcatgatcaaaaacactcctgttccagccaatcctcctacaaacttcagcgcggcaaagtttgcttccttcatcacacagtattccacgggacaggtcagcgtggagatcgagtgggagctgcagaaggagaacagcaaacgctggaaccccgagatccagtacacttccaactacaacaaatctgttaatgtggactttactgtggacactaatggtgtgtattcagagcctcgccccattggcaccagatacctgactcgtaatctgtaa

SEQ ID NO: 2129 - DNA, 2208 bp, Artificial Sequence
  Synthetic Polynucleotide
atggctgccgatggttatcttccagattggctcgaggacactctctctgaaggaataagacagtggtggaagctcaaacctggcccaccaccaccaaagcccgcagagcggcatcaggacgacagcaggggtcttgtgcttcctgggtacaagtacctcggacccttcaacggactcgacaaaggagagccggtcaacgaggcagacgctgcggccctcgagcacgacaaggcctacgaccggcagctcgacagcggagacaacccgtacctcaagtacaaccacgccgacgcggagtttcaggagcgtcttaaagaagatacgtcttttgggggcaacctcggacgagcagtcttccaggcgaaaaagagggttcttgaacctctgggcctggttgaggaacctgttaagacggctccgggaaaaaagaggccggtagagcactctcctgcggagccagactcctcctcgggaaccggaaaagcgggccagcagcctgcaagaaagagattgaatttcggtcagactggagacgcagactccgtacctgacccccagcctctcggacagccaccagcagcccccacaagtttgggatctactacaatggctacaggcagtggcgcaccaatggcagacaataacgagggtgccgatggagtgggtaattcctcaggaaattggcattgcgattcccaatggctgggcgacagagtcatcaccaccagcacccgaacctgggccctgcccacctacaacaaccacctctacaagcaaatctccagccaatcaggagcatcgaacgacaaccactactttggctacagcaccccttgggggtattttgacttcaacagattccactgtcacttctccccacgtgactggcaaagactcatcaacaacaactggggattccgacccaagagactcaacttcaagctctttaacattcaagtcaaagaggtcacgcagaatgacggtacgacgacgattgccaataaccttaccagcacggttcaggtgtttactgactcggagtaccagctcccgtacgtcctcggctcggcgcatcaaggatgcctcccgccgtttccagcggacgtcttcatggtcccacagtatggatacctcaccctgaacaacgggagtcaggcggtaggacgctcttccttttactgcctggagtactttccttctcagatgctgcgtaccggaaacaactttaccttcagctacacctttgaggacgtgcctttccacagcagctacgctcacagccagagtttggaccggctgatgaatcctctgatcgaccagtatctgtattatctgaacaggacacaatcaaatagtggaactcttcagcagtctaggctactgtttagccaagctggacccaccagcatgtctcttcaagctaaaaactggctgcctggaccttgctacagacagcagcgtctgtcaaagcaggcaaacgacaacaacaacagcaactttccctggactgcggctacaaagtatcatctaaatggtcgggactcgttggttaatccaggaccagctatggccagccacaaagacgatgaagaaaagtttttccccatgcatggaaccctgatatttggtaaacaaggaacaaatgctaacgacgcggatttggaacatgtcatgattacagatgaagaagaaatcaggaccaccaatcccgtggctacagagcagtacggaaacgtgtcaaataatttgcaaaactcaaatactggtccaactacagaaaatgtcaatcaccagggagcgttacctggtatggtgtggcaggatcgaggcgtgtacctgcagggacccatttgggccaagattcctcacaccgacggacactttcacccttctccactgatgggaggttttggactcaaacacccgcctcctcaaatcatgatcaaaaacactcctgttccagccaatcctcctacaaacttcagcgcggcaaagtttgcttccttcatcacacagtattccacgggacaggtcagcgtggagatcgagtgggagctgcagaaggagaacagcaaacgctggaaccccgagatccagtacacttccaactacaacaaatctgttaatgtggactttactgtggacactaatggtgtgtattcagagcctcgccccattggcaccagatacctgactcgtaatctgtaa

SEQ ID NO: 2130 - DNA, 2208 bp, Artificial Sequence
  Synthetic Polynucleotide
atggctgccgatggttatcttccagattggctcgaggacactctctctgaaggaataagacagtggtggaagctcaaacctggcccaccaccaccaaagcccgcagagcggcatcaggacgacagcaggggtcttgtgcttcctgggtacaagtacctcggacccttcaacggactcgacaaaggagagccggtcaacgaggcagacgctgcggccctcgagcacgacaaggcctacgaccggcagctcgacagcggagacaacccgtacctcaagtacaaccacgccgacgcggagtttcaggagcgtcttaaagaagatacgtcttttgggggcaacctcggacgagcagtcttccaggcgaaaaagagggttcttgaacctctgggcctggttgaggaacctgttaagacggctccgggaaaaaagaggccggtagagcactctcctgcggagccagactcctcctcgggaaccggaaaagcgggccagcagcctgcaagaaagagattgaatttcggtcagactggagacgcagactccgtacctgacccccagcctctcggacagccaccagcagcccccacaagtttgggatctactacaatggctacaggcagtggcgcaccaatggcagacaataacgagggtgccgatggagtgggtaattcctcaggaaattggcattgcgattcccaatggctgggcgacagagtcatcaccaccagcacccgaacctgggccctgcccacctacaacaaccacctctacaagcaaatctccagccaatcaggagcatcgaacgacaaccactactttggctacagcaccccttgggggtattttgacttcaacagattccactgtcacttctccccacgtgactggcaaagactcatcaacaacaactggggattccgacccaagagactcaacttcaagctctttaacattcaagtcaaagaggtcacgcagaatggcggtacgacgacgattgccaataaccttaccagcacggttcaggtgtttactgactcggagtaccagctcccgtacgtcctcggctcggcgcatcaaggatgcctcccgccgtttccagcggacgtcttcatggtcccacagtatggatacctcaccctgaacaacgggagtcaggcggtaggacgctcttccttttactgcctggagtactttccttctcagatgctgcgtaccggaaacaactttaccttcagctacacctttgaggacgtgcctttccacagcagctacgctcacagccagagtttggaccggctgatgaatcctctgatcgaccagtatctgtattatctgaacaggacacaatcaaatagtggaactcttcagcagtctaggctactgtttagccaagctggacccaccagcatgtctcttcaagctaaaaactggctgcctggaccttgctacagacagcagcgtctgtcaaagcaggcaaacgacaacaacaacagcaactttccctggactgcggctacaaagtatcatctaaatggtcgggactcgttggttaatccaggaccagctatggccagccacaaagacgatgaagaaaagtttttccccatgcatggaaccctgatatttggtaaacaaggaacaaatgctaacgacgcggatttggaacatgtcatgattacagatgaagaagaaatcaggaccaccaatcccgtggctacagagcagtacggaaacgtgtcaaataatttgcaaaactcaaatactggtccaactacagaaaatgtcaatcaccagggagcgttacctggtatggtgtggcaggatcgagacgtgtacctgcagggacccatttgggccaagattcctcacaccgacggacactttcacccttctccactgatgggaggttttggactcaaacacccgcctcctcaaatcatgatcaaaaacactcctgttccagccaatcctcctacaaacttcagcgcggcaaagtttgcttccttcatcacacagtattccacgggacaggtcagcgtggagatcgagtgggagctgcagaaggagaacagcaaacgctggaaccccgagatccagtacacttccaactacaacaaatctgttaatgtggactttactgtggacactaatggtgtgtattcagagcctcgccccattggcaccagatacctgactcgtaatctgtaa

SEQ ID NO: 2131 - DNA, 2208 bp, Artificial Sequence
  Synthetic Polynucleotide
atggctgccgatggttatcttccagattggctcgaggacactctctctgaaggaataagacagtggtggaagctcaaacctggcccaccaccaccaaagcccgcagagcggcatcaggacgacagcaggggtcttgtgcttcctgggtacaagtacctcggacccttcaacggactcgacaaaggagagccggtcaacgaggcagacgctgcggccctcgagcacgacaaggcctacgaccggcagctcgacagcggagacaacccgtacctcaagtacaaccacgccgacgcggagtttcaggagcgtcttaaagaagatacgtcttttgggggcaacctcggacgagcagtcttccaggcgaaaaagagggttcttgaacctctgggcctggttgaggaacctgttaagacggctccgggaaaaaagaggccggtagagcactctcctgcggagccagactcctcctcgggaaccggaaaagcgggccagcagcctgcaagaaagagattgaatttcggtcagactggagacgcagactccgtacctgacccccagcctctcggacagccaccagcagcccccacaagtttgggatctactacaatggctacaggcagtggcgcaccaatggcagacaataacgagggtgccgatggagtgggtaattcctcaggaaattggcattgcgattcccaatggctgggcgacagagtcatcaccaccagcacccgaacctgggccctgcccacctacaacaaccacctctacaagcaaatctccagccaatcaggagcatcgaacgacaaccactactttggctacagcaccccttgggggtattttgacttcaacagattccactgtcacttctccccacgtgactggcaaagactcatcaacaacaactggggattccgacccaagagactcaacttcaagctctttaacattcaagtcaaagaggtcacgcagaatgacggtacgacgacgattgccaataaccttaccagcacggttcaggtgtttactgactcggagtaccagctcccgtacgtcctcggctcggcgcatcaaggatgcctcccgccgtttccagcggacgtcttcatggtcccacagtatggatacctcaccctgaacaacgggagtcaggcggtaggacgctcttccttttactgcctggagtactttccttctcagatgctgcgtaccggaaacaactttaccttcagctacacctttgaggacgtgcctttccacagcagctacgctcacagccagagtttggaccggctgatgaatcctctgatcgaccagtatctgtattatctgaacaggacacaatcaaatagtggaactcttcagcagtctaggctactgtttagccaagctggacccaccagcatgtctcttcaagctaaaaactggctgcctggaccttgctacagacagcagcgtctgtcaaagcaggcaaacgacaacaacaacagcaactttccctggactgcggctacaaagtatcatctaaatggtcgggactcgttggttaatccaggaccagctatggccagccacaaagacgatgaagaaaagtttttccccatgcatggaaccctgatatttggtaaacaaggaacaaatgctaacgacgcggatttggaacatgtcatgattacagatgaagaagaaatcaggaccaccaatcccgtggctacagagcagtacggaaacgtgtcaaataatttgcaaaactcaaatactggtccaactacagaaaatgtcaatcaccagggagcgttacctggtatggtgtggcaggatcgagacgtgtacctgcagggacccatttgggccaagattcctcacaccgacggacactttcacccttctccactgatgggaggttttggactcaaacacccgcctcctcaaatcatgatcaaaaacactcctgttccagccaatcctcctacaaacttcagcgcggcaaagtttgcttccttcatcacacagtattccacgggacaggtcagcgtggagatcgagtgggagctgcggaaggagaacagcaaacgctggaaccccgagatccagtacacttccaactacaacaaatctgttaatgtggactttactgtggacactaatggcgtgtattcagagcctcgccccattggcaccagatacctgactcgtaatctgtaa

SEQ ID NO: 2132 - DNA, 2208 bp, Artificial Sequence
  Synthetic Polynucleotide
atggctgccgatggttatcttccagattggctcgaggacactctctctgaaggaataagacagtggtggaagctcaaacctggcccaccaccaccaaagcccgcagagcggcatcaggacgacagcaggggtcttgtgcttcctgggtacaagtacctcggacccttcaacggactcgacaaaggagagccggtcaacgaggcagacgctgcggccctcgagcacgacaaggcctacgaccggcagctcgacagcggagacaacccgtacctcaagtacaaccacgccgacgcggagtttcaggagcgtcttaaagaagatacgtcttttgggggcaacctcggacgagcagtcttccaggcgaaaaggagggttcttgaacctctgggcctggttgaggaacctgttaagacggctccgggaaaaaagaggccggtagagcactctcctgcggagccagactcctcctcgggaaccggaaaagcgggccagcagcctgcaagaaagagattgaatttcggtcagactggagacgcagactccgtacctgacccccagcctctcggacagccaccagcagcccccacaagtttgggatctactacaatggctacaggcagtggcgcaccaatggcagacaataacgagggtgccgatggagtgggtaattcctcaggaaattggcattgcgattcccaatggctgggcgacagagtcatcaccaccagcacccgaacctgggccctgcccacctacaacaaccacctctacaagcaaatctccagccaatcaggagcatcgaacgacaaccactactttggctacagcaccccttgggggtattttgacttcaacagattccactgtcacttctccccacgtgactggcaaagactcatcaacaacaactggggattccgacccaagagactcaacttcaagctctttaacattcaagtcaaagaggtcacgcagaatgacggtacgacgacgattgccaataaccttaccagcacggttcaggtgtttactgactcggagtaccagctcccgtacgtcctcggctcggcgcatcaaggatgcctcccgccgtttccagcggacgtcttcatggtcccacagtatggatacctcaccctgaacaacgggagtcaggcggtaggacgctcttccttttactgcctggagtactttccttctcagatgctgcgtaccggaaacaactttaccttcagctacacctttgaggacgtgcctttccacagcagctacgctcacagccagagtttggaccggctgatgaatcctctgatcgaccagtatctgtattatctgaacaggacacaatcaaatagtggaactcttcagcagtctaggctactgtttagccaagctggacccaccagcatgtctcttcaagctaaaaactggctgcctggaccttgctacagacagcagcgtctgtcaaagcaggcaaacgacaacaacaacagcaactttccctggactgcggctacaaagtatcatctaaatggtcgggactcgttggttaatccaggaccagctatggccagccacaaagacgatgaagaaaagtttttccccatgcatggaaccctgatatttggtaaacaaggaacaaatgctaacgacgcggatttggaacatgtcatgattacagatgaagaagaaatcaggaccaccaatcccgtggctacagagcagtacggaaacgtgtcaaataatttgcaaaactcaaatactggtccaactacagaaaatgtcaatcaccagggagcgttacctggtatggtgtggcaggatcgagacgtgtacctgcagggacccatttgggccaagattcctcacaccgacggacactttcacccttctccactgatgggaggttttggactcaaacacccgcctcctcaaatcatgatcaaaaacactcctgttccagccaatcctcctacaaacttcagcgcggcaaagtttgcttccttcatcacacagtattccacgggacaggtcagcgtggagatcgagtgggagctgcagaaggagaacagcaaacgctggaaccccgagatccagtacacttccaactacaacaaatctgttaatgtggactttactgtggacactaatggtgtgtattcagagcctcgccccattggcaccagatacctgactcgtaatctgtaa

SEQ ID NO: 2133 - DNA, 2208 bp, Artificial Sequence
  Synthetic Polynucleotide
atggctgccgatggttatcttccagattggctcgaggacactctctctgaaggaataagacagtggtggaagctcaaacctggcccaccaccaccaaagcccgcagagcggcatcaggacgacagcaggggtcttgtgcttcctgggtacaagtacctcggacccttcaacggactcgacaaaggagagccggtcaacgaggcagacgctgcggccctcgagcacgacaaggcctacgaccggcagctcgacagcggagacaacccgtacctcaagtacaaccacgccgacgcggagcttcaggagcgtcttaaagaagatacgtcttttgggggcaacctcggacgagcagtcttccaggcgaaaaagagggttcttgaacctctgggcctggttgaggaacctgttaagacggctccgggaaaaaagaggccggtagagcactctcctgcggagccagactcctcctcgggaaccggaaaagcgggccagcagcctgcaagaaagagattgaatttcggtcagactggagacgcagactccgtacctgacccccagcctctcggacagccaccagcagcccccacaagtttgggatctactacaatggctacaggcagtggcgcaccaatggcagacaataacgagggtgccgatggagtgggtaattcctcaggaaattggcattgcgattcccaatggctgggcgacagagtcatcaccaccagcacccgaacctgggccctgcccacctacaacaaccacctctacaagcaaatctccagccaatcaggagcatcgaacgacaaccactactttggctacagcaccccttgggggtattttgacttcaacagattccactgtcacttctccccacgtgactggcaaagactcatcaacaacaactggggattccgacccaagagactcaacttcaagctctttaacattcaagtcaaagaggtcacgcagaatgacggtacgacgacgattgccaataaccttaccagcacggttcaggtgtttactgactcggagtaccagctcccgtacgtcctcggctcggcgcatcaaggatgcctcccgccgtttccagcggacgtcttcatggtcccacagtatggatacctcaccctgaacaacgggagtcaggcggtaggacgctcttccttttactgcctggagtactttccttctcagatgctgcgtaccggaaacaactttaccttcagctacacctttgaggacgtgcctttccacagcagctacgctcacagccagagtttggaccggctgatgaatcctctgatcgaccagtatctgtattatctgaacaggacacaatcaaatagtggaactcttcagcagtctaggctactgtttagccaagctggacccaccagcatgtctcttcaagctaaaaactggctgcctggaccttgctacagacagcagcgtctgtcaaagcaggcaaacgacaacaacaacagcaactttccctggactgcggctacaaagtatcatctaaatggtcgggactcgttggttaatccaggaccagctatggccagccacaaagacgatgaagaaaagtttttccccatgcatggaaccctgatatttggtaaacaaggaacaaatgctaacgacgcggatttggaacatgtcatgattacagatgaagaagaaatcaggaccaccaatcccgtggctacagagcagtacggaaacgtgtcaaataatttgcaaaactcaaatactggtccaactacagaaaatgtcaatcaccagggagcgttacctggtatggtgtggcaggatcgagacgtgtacctgcagggacccatttgggccaagattcctcacaccgacggacactttcacccttctccactgatgggaggttttggactcaaacacccgcctcctcaaatcatgatcaaaaacactcctgttccagccaatcctcctacaaacttcagcgcggcaaagtttgcttccttcatcacacagtattccacgggacaggtcagcgtggagatcgagtgggagctgcagaaggagaacagcaaacgctggaaccccgagatccagtacacttccaactacaacaaatctgttaatgtggactttactgtggacactaatggtgtgtattcagagcctcgccccattggcaccagatacctgactcgtaatctgtaa

SEQ ID NO: 2134 - DNA, 2208 bp, Artificial Sequence
  Synthetic Polynucleotide
atggctgccgatggttatcttccagattggctcgaggacactctctctgaaggaataagacagtggtggaagctcaaacctggcccaccaccaccaaagcccgcagagcggcatcaggacgacagcaggggtcttgtgcttcctgggtacaagtacctcggacccttcaacggactcgacaaaggagagccggtcaacgaggcagacgctgcggccctcgagcacgacaaggcctacgaccggcagctcgacagcggagacaacccgtacctcaagtacaaccacgccgacgcggagtttcaggagcgtcttaaagaagatacgtcttttgggggcaacctcggacgagcagtcttccaggcgaaaaagagggttcttgaacctctgggcctggttgaggaacctgttaagacggctccgggaaaaaagaggccggtagagcactctcctgcggagccagactcctcctcgggaaccggaaaagcgggccagcagcctgcaagaaagagattgaatttcggtcagactggagacgcagactccgtacctgacccccagcctctcggacagccaccagcagcccccacaagtttgggatctactacaatggctacaggcagtggcgcaccaatggcagacaataacgagggtgccgatggagtgggtaattcctcaggaaattggcattgcgattcccaatggctgggcggcagagtcatcaccaccagcacccgaacctgggccctgcccacctacaacaaccacctctacaagcaaatctccagccaatcaggagcatcgaacgacaaccactactttggctacagcaccccttgggggtattttgacttcaacagattccactgtcacttctccccacgtgactggcaaagactcatcaacaacaactggggattccgacccaagagactcaacttcaagctctttaacattcaagtcaaagaggtcacgcagaatgacggtacgacgacgattgccaataaccttaccagcacggttcaggtgtttactgactcggagtaccagctcccgtacgtcctcggctcggcgcatcaaggatgcctcccgccgtttccagcggacgtcttcatggtcccacagtatggatacctcaccctgaacaacgggagtcaggcggtaggacgctcttccttttactgcctggagtactttccttctcagatgctgcgtaccggaaacaactttaccttcagctacacctttgaggacgtgcctttccacagcagctacgctcacagccagagtttggaccggctgatgaatcctctgatcgaccagtatctgtattatctgaacaggacacaatcaaatagtggaactcttcagcagtctaggctactgtttagccaagctggacccaccagcatgtctcttcaagctaaaaactggctgcctggaccttgctacagacagcagcgtctgtcaaagcaggcaaacgacaacaacaacagcaactttccctggactgcggctacaaagtatcatctaaatggtcgggactcgttggttaatccaggaccagctatggccagccacaaagacgatgaagaaaagtttttccccatgcatggaaccctgatatttggtaaacaaggaacaaatgctaacgacgcggatttggaacatgtcatgattacagatgaagaagaaatcaggaccaccaatcccgtggctacagagcagtacggaaacgtgtcaaataatttgcaaaactcaaatactggtccaactacagaaaatgtcaatcaccagggagcgttacctggtatggtgtggcaggatcgagacgtgtacctgcagggacccatttgggccaagattcctcacaccgacggacactttcacccttctccactgatgggaggttttggactcaaacacccgcctcctcaaatcatgatcaaaaacactcctgttccagccaatcctcctacaaacttcagcgcggcaaagtttgcttccttcatcacacagtattccacgggacaggtcagcgtggagatcgagtgggagctgcagaaggagaacagcaaacgctggaaccccgagatccagtacacttccaactacaacaaatctgttaatgtggactttactgtggacactaatggtgtgtattcagagcctcgccccattggcaccagatacctgactcgtaatctgtaa

SEQ ID NO: 2135 - DNA, 2208 bp, Artificial Sequence
  Synthetic Polynucleotide
atggctgccgatggttatcttccagattggctcgaggacactctctctgaaggaataagacagtggtggaagctcaaacctggcccaccaccaccaaagcccgcagagcggcatcaggacgacagcaggggtcttgtgcttcctgggtacaagtacctcggacccttcaacggactcgacaaaggagagccggtcaacgaggcagacgctgcggccctcgagcacgacaaggcctacgaccggcagctcgacagcggagacaacccgtacctcaagtacaaccacgccgacgcggagtttcaggagcgtcttaaagaagatacgtcttttgggggcaacctcggacgagcagtcttccaggcgaaaaagagggttcttgaacctctgggcctggttgaggaacctgttaagacggctccgggaaaaaagaggccggtagagcactctcctgcggagccagactcctcctcgggaaccggaaaagcgggccagcagcctgcaagaaagagattgaatttcggtcagactggagacgcagactccgtacctgacccccagcctctcggacagccaccagcagcccccacaagtttgggatctactacaatggctacaggcagtggcgcaccaatggcagacaataacgagggtgccgatggagtgggtaattcctcaggaaattggcattgcgattcccaatggctgggcgacagagtcatcaccaccagcacccgaacctgggccctgcccacctacaacaaccacctctacaagcaaatctccagccaatcaggagcatcgaacgacaaccactactttggctacagcaccccttgggggtattttgacttcaacagattccactgtcacttctccccacgtgactggcaaagactcatcaacaacaactggggattccgacccaagagactcaacttcaagctctttaacattcaagtcaaagaggtcacgcagaatgacggtacgacgacgattgccaataaccttaccagcacggttcaggtgtttactgactcggagtaccagctcccgtacgtcctcggctcggcgcatcaaggatgcctcccgccgcttccagcggacgtcttcatggtcccacagtatggatacctcaccctgaacaacgggagtcaggcggtaggacgctcttccttttactgcctggagtactttccttctcagatgctgcgtaccggaaacaactttaccttcagctacacctttgaggacgtgcctttccacagcagctacgctcacagccagagtttggaccggctgatgaatcctctgatcgaccagtatctgtattatctgaacaggacacaatcaaatagtggaactcttcagcagtctaggctactgtttagccaagctggacccaccagcatgtctcttcaagctaaaaactggctgcctggaccttgctacagacagcagcgtctgtcaaagcaggcaaacgacaacaacaacagcaactttccctggactgcggctacaaagtatcatctaaatggtcgggactcgttggttaatccaggaccagctatggccagccacaaagacgatgaagaaaagtttttccccatgcatggaaccctgatatttggtaaacaaggaacaaatgctaacgacgcggatttggaacatgtcatgattacagatgaagaagaaatcaggaccaccaatcccgtggctacagagcagtacggaaacgtgtcaaataatttgcaaaactcaaatactggtccaactacagaaaatgtcaatcaccagggagcgttacctggtatggtgtggcaggatcgagacgtgtacctgcagggacccatttgggccaagattcctcacaccgacggacactttcacccttctccactgatgggaggttttggactcaaacacccgcctcctcaaatcatgatcaaaaacactcctgttccagccaatcctcctacaaacttcagcgcggcaaagtttgcttccttcatcacacagtattccacgggacaggtcagcgtggagatcgagtgggagctgcagaaggagaacagcaaacgctggaaccccgagatccagtacacttccaactacaacaaatctgttaatgtggactttactgtggacactaatggtgtgtattcagagcctcgccccattggcaccagatacctgactcgtaatctgtaa

SEQ ID NO: 2136 - DNA, 2208 bp, Artificial Sequence
  Synthetic Polynucleotide
atggctgccgatggttatcttccagattggctcgaggacactctctctgaaggaataagacagtggtggaagctcaaacctggcccaccaccaccaaagcccgcagagcggcatcaggacgacagcaggggtcttgtgcttcctgggtacaagtacctcggacccttcaacggactcgacaaaggagagccggtcaacgaggcagacgctgcggccctcgagcacgacaaggcctacgaccggcagctcgacagcggagacaacccgtacctcaagtacaaccacgccgacgcggagtttcaggagcgtcttaaagaagatacgtcttttgggggcaacctcggacgagcagtcttccaggcgaaaaagagggttcttgaacctctgggcctggttgaggaacctgttaagacggctccgggaaaaaagaggccggtagagcactctcctgcggagccagactcctcctcgggaaccggaaaagcgggccagcagcctgcaagaaagagattgaatttcggtcagactggagacgcagactccgtacctgacccccagcctctcggacagccaccagcagcccccacaagtttgggatctactgcaatggctacaggcagtggcgcaccaatggcagacaataacgagggtgccgatggagtgggtaattcctcaggaaattggcattgcgattcccaatggctgggcgacagagtcatcaccaccagcacccgaacctgggccctgcccacctacaacaaccacctctacaagcaaatctccagccaatcaggagcatcgaacgacaaccactactttggctacagcaccccttgggggtattttgacttcaacagattccactgtcacttctccccacgtgactggcaaagactcatcaacaacaactggggattccgacccaagagactcaacttcaagctctttaacattcaagtcaaagaggtcacgcagaatgacggtacgacgacgattgccaataaccttaccagcacggttcaggtgtttactgactcggagtaccagctcccgtacgtcctcggctcggcgcatcaaggatgcctcccgccgtttccagcggacgtcttcatggtcccacagtatggatacctcaccctgaacaacgggagtcaggcggtaggacgctcttccttttactgcctggagtactttccttctcagatgctgcgtaccggaaacaactttaccttcagctacacctttgaggacgtgcctttccacagcagctacgctcacagccagagtttggaccggctgatgaatcctctgatcgaccagtatctgtattatctgaacaggacacaatcaaatagtggaactcttcagcagtctaggctactgtttagccaagctggacccaccagcatgtctcttcaagctaaaaactggctgcctggaccttgctacagacagcagcgtctgtcaaagcaggcaaacgacaacaacaacagcaactttccctggactgcggctacaaagtatcatctaaatggtcgggactcgttggttaatccaggaccagctatggccagccacaaagacgatgaagaaaagtttttccccatgcatggaaccctgatatttggtaaacaaggaacaaatgctaacgacgcggatttggaacatgtcatgattacagatgaagaagaaatcaggaccaccaatcccgtggctacagagcagtacggaaacgtgtcaaataatttgcaaaactcaaatactggtccaactacagaaaatgtcaatcaccagggagcgttacctggtatggtgtggcaggatcgagacgtgtacctgcagggacccatttgggccaagattcctcacaccgacggacactttcacccttctccactgatgggaggttttggactcaaacacccgcctcctcaaatcatgatcaaaaacactcctgttccagccaatcctcctacaaacttcagcgcggcaaagtttgcttccttcatcacacagtattccacgggacaggtcagcgtggagatcgagtgggagctgcagaaggagaacagcaaacgctggaaccccgagatccagtacacttccaactacaacaaatctgttaatgtggactttactgtggacactaatggtgtgtattcagagcctcgccccattggcaccagatacctgactcgtaatctgtaa

SEQ ID NO: 2137 - DNA, 2208 bp, Artificial Sequence
  Synthetic Polynucleotide
atggctgccgatggttatcttccagattggctcgaggacactctctctgaaggaataagacagtggtggaagctcaaacctggcccaccaccaccaaagcccgcagagcggcatcaggacgacagcaggggtcttgtgcttcctgggtacaagtacctcggacccttcaacggactcgacaaaggagagccggtcaacgaggcagacgctgcggccctcgagcacgacaaggcctacgaccggcagctcgacagcggagacaacccgtacctcaagtacaaccacgccgacgcggagtttcaggagcgtcttaaagaagatacgtcttttgggggcaacctcggacgagcagtcttccaggcgaaaaagagggttcttgaacctctgggcctggttgaggaacctgttaagacggctccgggaaaaaagaggccggtagagcactctcctgcggagccagactcctcctcgggaaccggaaaagcgggccagcagcctgcaagaaagagattgaatttcggtcagactggagacgcagactccgtacctgacccccagcctctcggacagccaccagcagcccccacaagtttgggatctactacaatggctacaggcagtggcgcaccaatggcagacaataacgagggtgccgatggagtgggtaattcctcaggaaattggcattgcgattcccaatggctgggcgacagagtcatcaccaccagcacccgaacctgggccctgcccacctacaacaaccacctctacaagcaaatctccagccaatcaggagcatcgaacgacaaccactactttggctacagcaccccttgggggtattttgacttcaacagattccactgtcacttctccccacgtgactggcaaagactcatcaacaacaactggggattccgacccaagagactcaacttcaagctctttaacattcaagtcaaagaggtcacgcagaatgacggtacgacgacgattgccaataaccttaccagcacggttcaggtgtttactgactcggagtaccagctcccgtacgtcctcggctcggcgcatcaaggatgcctcccgccgtttccagcggacgtcttcatggtcccacagtatggatacctcaccctgaacaacgggagtcaggcggtaggacgctcttccttttactgcctggagtactttccttctcagatgctgcgtaccggaaacaactttaccttcagctacacctttgaggacgtgcctttccacagcagctacgctcacagccagagtttggaccggctgatgaatcctctgatcgaccagtatctgtattatctgaacaggacacaatcaaatagtggaactcttcagcagtctaggctactgtttagccaagctggacccaccagcatgtctcttcaagctaaaaactggctgcctggaccttgctacagacagcagcgtctgtcaaggcaggcaaacgacaacaacaacagcaactttccctggactgcggctacaaagtatcatctaaatggtcgggactcgttggttaatccaggaccagctatggccagccacaaagacgatgaagaaaagtttttccccatgcatggaaccctgatatttggtaaacaaggaacaaatgctaacgacgcggatttggaacatgtcatgattacagatgaagaagaaatcaggaccaccaatcccgtggctacagagcagtacggaaacgtgtcaaataatttgcaaaactcaaatactggtccaactacagaaaatgtcaatcaccagggagcgttacctggtatggtgtggcaggatcgagacgtgtacctgcagggacccatttgggccaagattcctcacaccgacggacactttcacccttctccactgatgggaggttttggactcaaacacccgcctcctcaaatcatgatcaaaaacactcctgttccagccaatcctcctacaaacttcagcgcggcaaagtttgcttccttcatcacacagtattccacgggacaggtcagcgtggagatcgagtgggagctgcagaaggagaacagcaaacgctggaaccccgagatccagtacacttccaactacaacaaatctgttaatgtggactttactgtggacactaatggtgtgtattcagagcctcgccccattggcaccagatacctgactcgtaatctgtaa

SEQ ID NO: 2138 - DNA, 2208 bp, Artificial Sequence
  Synthetic Polynucleotide
atggctgccgatggttatcttccagattggctcgaggacactctctctgaaggaataagacagtggtggaagctcaaacctggcccaccaccaccaaagcccgcagagcggcatcaggacgacagcaggggtcttgtgcttcctgggtacaagtacctcggacccttcaacggactcgacaaaggagagccggtcaacgaggcagacgctgcggccctcgagcacgacaaggcctacgaccggcagctcggcagcggagacaacccgtacctcaagtacaaccacgccgacgcggagtttcaggagcgtcttaaagaagatacgtcttttgggggcaacctcggacgagcagtcttccaggcgaaaaagagggttcttgaacctctgggcctggttgaggaacctgttaagacggctccgggaaaaaagaggccggtagagcactctcctgcggagccagactcctcctcgggaaccggaaaagcgggccagcagcctgcaagaaagagattgaatttcggtcagactggagacgcagactccgtacctgacccccagcctctcggacagccaccagcagcccccacaagtttgggatctactacaatggctacaggcagtggcgcaccaatggcagacaataacgagggtgccgatggagtgggtaattcctcaggaaattggcattgcgattcccaatggctgggcgacagagtcatcaccaccagcacccgaacctgggccctgcccacctacaacaaccacctctacaagcaaatctccagccaatcaggagcatcgaacgacaaccactactttggctacagcaccccttgggggtattttgacttcaacagattccactgtcacttctccccacgtgactggcaaagactcatcaacaacaactggggattccgacccaagagactcaacttcaagctctttaacattcaagtcaaagaggtcacgcagaatgacggtacgacgacgattgccaataaccttaccagcacggttcaggtgtttactgactcggagtaccagctcccgtacgtcctcggctcggcgcatcaaggatgcctcccgccgtttccagcggacgtcttcatggtcccacagtatggatacctcaccctgaacaacgggagtcaggcggtaggacgctcttccttttactgcctggagtactttccttctcagatgctgcgtaccggaaacaactttaccttcagctacacctttgaggacgtgcctttccacagcagctacgctcacagccagagtttggaccggctgatgaatcctctgatcgaccagtatctgtattatctgaacaggacacaatcaaatagtggaactcttcagcagtctaggctactgtttagccaagctggacccaccagcatgtctcttcaagctaaaaactggctgcctggaccttgctacagacagcagcgtctgtcaaagcaggcaaacgacaacaacaacagcaactttccctggactgcggctacaaagtatcatctaaatggtcgggactcgttggttaatccaggaccagctatggccagccacaaagacgatgaagaaaagtttttccccatgcatggaaccctgatatttggtaaacaaggaacaaatgctaacgacgcggatttggaacatgtcatgattacagatgaagaagaaatcaggaccaccaatcccgtggctacagagcagtacggaaacgtgtcaaataatttgcaaaactcaaatactggtccaactacagaaaatgtcaatcaccagggagcgttacctggtatggtgtggcaggatcgagacgtgtacctgcagggacccatttgggccaagattcctcacaccgacggacactttcacccttctccactgatgggaggttttggactcaaacacccgcctcctcaaatcatgatcaaaaacactcctgttccagccaatcctcctacaaacttcagcgcggcaaagtttgcttccttcatcacacagtattccacgggacaggtcagcgtggagatcgagtgggagctgcagaaggagaacagcaaacgctggaaccccgagatccagtacacttccaactacaacaaatctgttaatgtggactttactgtggacactaatggtgtgtattcagagcctcgccccattggcaccagatacctgactcgtaatctgtaa

SEQ ID NO: 2139 - DNA, 2208 bp, Artificial Sequence
  Synthetic Polynucleotide
atggctgccgatggttatcttccagattggctcgaggacactctctctgaaggaataagacagtggtggaagctcaaacctggcccaccaccaccaaagcccgcagagcggcatcaggacgacagcaggggtcttgtgcttcctgggtacaagtacctcggacccttcaacggactcgacaaaggagagccggtcaacgaggcagacgctgcggccctcgagcacgacaaggcctacgaccggcagctcgacagcggagacaacccgtacctcaagtacaaccacgccgacgcggagtttcaggagcgtcttaaagaagatacgtcttttgggggcaacctcggacgagcagtcttccaggcgaaaaagagggttcttgaacctctgggcctggttgaggaacctgttaagacggctccgggaaaaaagaggccggtagagcactctcctgcggagccagactcctcctcgggaaccggaaaagcgggccagcagcctgcaagaaagagattgaatttcggtcagactggagacgcagactccgtacctgacccccagcctctcggacagccaccagcagcccccacaagtttgggatctactacaatggctacaggcagtggcgcaccaatggcagacaataacgagggtgccgatggagtgggtaattcctcaggaaattggcattgcgattcccaatggctgggcgacagagtcatcaccaccagcacccgaacctgggccctgcccacctacaacaaccacctctacaagcaaatctccagccaatcaggagcatcgaacgacaaccactactttggctacagcaccccttgggggtattttgacttcaacagattccactgtcacttctccccacgtgactggcaaagactcatcaacaacaactggggattccgacccaagagactcaacttcaagctctttaacattcaagtcaaagaggtcacgcagaatgacggtacgacgacgattgccaataaccttaccagcacggttcaggtgtttactgactcggagtaccagctcccgtacgtcctcggctcggcgcatcaaggatgcctcccgccgtttccagcggacgtcttcatggtcccacagtatggatacctcaccctgaacaacgggagtcaggcggtaggacgctcttccttttactgcctggagtactttccttctcagatgctgcgtaccggaaacaactttaccttcagctacacctttgaggacgtgcctttccacagcagctacgctcacagccagagtttggaccggctgatgaatcctctgatcgaccagtatctgcattatctgaacaggacacaatcaaatagtggaactcttcagcagtctaggctactgtttagccaagctggacccaccagcatgtctcttcaagctaaaaactggctgcctggaccttgctacagacagcagcgtctgtcaaagcaggcaaacgacaacaacaacagcaactttccctggactgcggctacaaagtatcatctaaatggtcgggactcgttggttaatccaggaccagctatggccagccacaaagacgatgaagaaaagtttttccccatgcatggaaccctgatatttggtaaacaaggaacaaatgctaacgacgcggatttggaacatgtcatgattacagatgaagaagaaatcaggaccaccaatcccgtggctacagagcagtacggaaacgtgtcaaataatttgcaaaactcaaatactggtccaactacagaaaatgtcaatcaccagggagcgttacctggtatggtgtggcaggatcgagacgtgtacctgcagggacccatttgggccaagattcctcacaccgacggacactttcacccttctccactgatgggaggttttggactcaaacacccgcctcctcaaatcatgatcaaaaacactcctgttccagccaatcctcctacaaacttcagcgcggcaaagtttgcttccttcatcacacagtattccacgggacaggtcagcgtggagatcgagtgggagctgcagaaggagaacagcaaacgctggaaccccgagatccagtacacttccaactacaacaaatctgttaatgtggactttactgtggacactaatggtgtgtattcagagcctcgccccattggcaccagatacctgactcgtaatctgtaa

SEQ ID NO: 2140 - DNA, 2208 bp, Artificial Sequence
  Synthetic Polynucleotide
atggctgccgatggttatcttccagattggctcgaggacactctctctgaaggaataagacagtggtggaagctcaaacctggcccaccaccaccaaagcccgcagagcggcatcaggacgacagcaggggtcttgtgcttcctgggtacaagtacctcggacccttcaacggactcgacaaaggagagccggtcaacgaggcagacgctgcggccctcgagcacgacaaggcctacgaccggcagctcgacagcggagacaacccgtacctcaagtacaaccacgccgacgcggagtttcaggagcgtcttaaagaagatacgtcttttgggggcaacctcggacgagcagtcttccaggcgaaaaagagggttcttgaacctctgggcctggttgaggaacctgttaagacggctccgggaaaaaagaggccggtagagcaccctcctgcggagccagactcctcctcgggaaccggaaaagcgggccagcagcctgcaagaaagagattgaatttcggtcagactggagacgcagactccgtacctgacccccagcctctcggacagccaccagcagcccccacaagtttgggatctactacaatggctacaggcagtggcgcaccaatggcagacaataacgagggtgccgatggagtgggtaattcctcaggaaattggcattgcgattcccaatggctgggcgacagagtcatcaccaccagcacccgaacctgggccctgcccacctacaacaaccacctctacaagcaaatctccagccaatcaggagcatcgaacgacaaccactactttggctacagcaccccttgggggtattttgacttcaacagattccactgtcacttctccccacgtgactggcaaagactcatcaacaacaactggggattccgacccaagagactcaacttcaagctctttaacattcaagtcaaagaggtcacgcagaatgacggtacgacgacgattgccaataaccttaccagcacggttcaggtgtttactgactcggagtaccagctcccgtacgtcctcggctcggcgcatcaaggatgcctcccgccgtttccagcggacgtcttcatggtcccacagtatggatacctcaccctgaacaacgggagtcaggcggtaggacgctcttccttttactgcctggagtactttccttctcagatgctgcgtaccggaaacaactttaccttcagctacacctttgaggacgtgcctttccacagcagctacgctcacagccagagtttggaccggctgatgaatcctctgatcgaccagtatctgtattatctgaacaggacacaatcaaatagtggaactcttcagcagtctaggctactgtttagccaagctggacccaccagcatgtctcttcaagctaaaaactggctgcctggaccttgctacagacagcagcgtctgtcaaagcaggcaaacgacaacaacaacagcaactttccctggactgcggctacaaagtatcatctaaatggtcgggactcgttggttaatccaggaccagctatggccagccacaaagacgatgaagaaaagtttttccccatgcatggaaccctgatatttggtaaacaaggaacaaatgctaacgacgcggatttggaacatgtcatgattacagatgaagaagaaatcaggaccaccaatcccgtggctacagagcagtacggaaacgtgtcaaataatttgcaaaactcaaatactggtccaactacagaaaatgtcaatcaccagggagcgttacctggtatggtgtggcaggatcgagacgtgtacctgcagggacccatttgggccaagattcctcacaccgacggacactttcacccttctccactgatgggaggttttggactcaaacacccgcctcctcaaatcatgatcaaaaacactcctgttccagccaatcctcctacaaacttcagcgcggcaaagtttgcttccttcatcacacagtattccacgggacaggtcagcgtggagatcgagtgggagctgcagaaggagaacagcaaacgctggaaccccgagatccagtacacttccaactacaacaaatctgttaatgtggactttactgtggacactaatggtgtgtattcagagcctcgccccattggcaccagatacctgactcgtaatctgtaa

SEQ ID NO: 2141 - DNA, 2208 bp, Artificial Sequence
  Synthetic Polynucleotide
atggctgccgatggttatcttccagattggctcgaggacactctctctgaaggaataagacagtggtggaagctcaaacctggcccaccaccaccaaagcccgcagagcggcatcaggacgacagcaggggtcttgtgcttcctgggtacaagtacctcggacccttcaacggactcgacaaaggagagccggtcaacgaggcagacgctgcggccctcgagcacgacaaggcctacgaccggcagctcgacagcggagacaacccgtacctcaagtacaaccacgccgacgcggagtttcaggagcgtcttaaagaagatacgtcttttgggggcaacctcggacgagcagtcttccaggcgaaaaagagggttcttgaacctctgggcctggttgaggaacctgttaagacggctccgggaaaaaagaggccggtagagcactctcctgcggagccagactcctcctcgggaaccggaaaagcgggccagcagcctgcaagaaagagattgaatttcggtcagactggagacgcagactccgtacctgacccccagcctctcggacagccaccagcagcccccacaagtttgggatctactacaatggctacaggcagtggcgcaccaatggcagacaataacgagggtgccgatggagtgggtaattcctcaggaaattggcattgcgattcccaatggctgggcgacagagtcatcaccaccagcacccgaacctgggccctgcccacctacaacaaccacctctacaagcaaatctccagccaatcaggagcatcgaacgacaaccactactttggctacagcaccccttgggggtattttgacttcaacagattccactgtcacttctccccacgtgactggcaaagactcatcaacaacaactggggattccgacccaagagactcaacttcaagctctttaacattcaagtcaaagaggtcacgcagaatgacggtacgacgacgattgccaataaccttaccagcacggttcaggtgtttactgactcggagtaccagctcccgtacgtcctcggctcggcgcatcaaggatgcctcccgccgtttccagcggacgtcttcatggtcccacagtatggatacctcaccctgaacaacgggagtcaggcggtaggacgctcttccttttactgcctggagtactttccttctcagatgctgcgtaccggaaacaactttaccttcagctacacctttgaggacgtgcctttccacagcagctacgctcacagccagagtttggaccggctgatgaatcctctgatcgaccagtatctgtattatctgaacaggacacaatcaaatagtggaactcttcagcagtctaggctactgtttagccaagctggacccaccagcatgtctcttcaagctaaaaactggctgcctggaccttgctacagacagcagcgtctgtcaaagcaggcaaacgacaacaacaacagcaactttccctggactgcggctacaaagtatcatctaaatggtcgggactcgttggttaatccaggaccagctatggccagccacaaagacgatgaagaaaagtttttccccatgcatggaaccctgatatttggtaaacaaggaacaaatgctaacgacgcggatttggaacatgtcatgattacagatgaagaagaaatcaggaccaccaatcccgtggctacagagcagtacggaaacgtgtcaaataatttgcaaaactcaaatactggtccaactacagaaaatgtcaatcaccagggagcgttacctggtatggtgtggcaggatcgagacgtgtacctgcagggacccatttgggccaagattcctcacaccgacggacactttcacccttctccactgatgggaggttttggactcaaacacccgcctcctcaaatcatgatcaaaaacactcctgttccagccaatcctcctacaaacttcagcgcggcaaagtttgcttccttcatcacacagtattccacgggacaggtcagcgtggagatcgagtgggagctgcagaaggagaacagcaaacgctggaaccccgagatccagtacacttccaactacaacaaatctgttaatgtggactttactgcggacactaatggtgtgtattcagagcctcgccccattggcaccagatacctgactcgtaatctgtaa

SEQ ID NO: 2142 - DNA, 2208 bp, Artificial Sequence
  Synthetic Polynucleotide
atggctgccgatggttatcttccagattggctcgaggacactctctctgaaggaataagacagtggtggaagctcaaacctggcccaccaccaccaaagcccgcagagcggcatcaggacgacagcaggggtcttgtgcttcctgggtacaagtacctcggacccttcaacggactcgacaaaggagagccggtcaacgaggcagacgctgcggccctcgagcacgacaaggcctacgaccggcagctcgacagcggagacaacccgtacctcaagtacaaccacgccgacgcggagtttcaggagcgtcttaaagaagatacgtcttttgggggcaacctcggacgagcagtcttccaggcgaaaaagagggttcttgaacctctgggcctggttgaggaacctgttaagacggctccgggaaaaaagaggccggtagagcactctcctgcggagccagactcctcctcgggaaccggaaaagcgggccagcagcctgcaagaaagagattgaatttcggtcagactggagacgcagactccgtacctgacccccagcctctcggacagccaccagcagcccccacaagtttgggatctactacaatggctacaggcagtggcgcaccaatggcagacaataacgagggtgccgatggagtgggtaattcctcaggaaattggcattgcgattcccaatggctgggcgacagagtcatcaccaccagcacccgaacctgggccctgcccacctacaacaaccacctctacaagcaaatctccagccaatcaggagcatcgaacgacaaccactactttggctacagcaccccttgggggtattttgacttcaacagattccactgtcacttctccccacgtgactggcaaagactcatcaacaacaactggggattccgacccaagagactcaacttcaagctctttaacattcaagtcaaagaggtcacgcagaatgacggtacgacgacgattgccaataaccttaccagcacggttcaggtgtttactgactcggagtaccagctcccgtacgtcctcggctcggcgcatcaaggatgcctcccgccgtttccagcggacgtcttcatggtcccacagtatggatacctcaccctgaacaacgggagtcaggcggtaggacgctcttccttttactgcctggagtactttccttctcagatgctgcgtaccggaaacaactttaccttcagctacacctttgaggacgtgcctttccacagcagctacgctcacagccagagtttggaccggctgatgaatcctctgatcgaccagtatctgtattatctgaacaggacacaatcaaatagtggaactcttcggcagtctaggctactgtttagccaagctggacccaccagcatgtctcttcaagctaaaaactggctgcctggaccttgctacagacagcagcgtctgtcaaagcaggcaaacgacaacaacaacagcaactttccctggactgcggctacaaagtatcatctaaatggtcgggactcgttggttaatccaggaccagctatggccagccacaaagacgatgaagaaaagtttttccccatgcatggaaccctgatatttggtaaacaaggaacaaatgctaacgacgcggatttggaacatgtcatgattacagatgaagaagaaatcaggaccaccaatcccgtggctacagagcagtacggaaacgtgtcaaataatttgcaaaactcaaatactggtccaactacagaaaatgtcaatcaccagggagcgttacctggtatggtgtggcaggatcgagacgtgtacctgcagggacccatttgggccaagattcctcacaccgacggacactttcacccttctccactgatgggaggttttggactcaaacacccgcctcctcaaatcatgatcaaaaacactcctgttccagccaatcctcctacaaacttcagcgcggcaaagtttgcttccttcatcacacagtattccacgggacaggtcagcgtggagatcgagtgggagctgcagaaggagaacagcaaacgctggaaccccgagatccagtacacttccaactacaacaaatctgttaatgtggactttactgtggacactaatggtgtgtattcagagcctcgccccattggcaccagatacctgactcgtaatctgtaa

SEQ ID NO: 2143 - DNA, 2208 bp, Artificial Sequence
  Synthetic Polynucleotide
atggctgccgatggttatcttccagattggctcgaggacactctctctgaaggaataagacagtggtggaagctcaaacctggcccaccaccaccaaagcccgcagagcggcatcaggacgacagcaggggtcttgtgcttcctgggtacaagtacctcggacccttcaacggactcgacaaaggagagccggtcaacgaggcagacgctgcggccctcgagcacgacaaggcctacgaccggcagctcgacagcggagacaacccgtacctcaagtacaaccacgccgacgcggagtttcaggagcgtcttaaagaagatacgtcttttgggggcaacctcggacgagcagtcttccaggcgaaaaagagggttcttgaacctctgggcctggttgaggaacctgttaagacggctccgggaaaaaagaggccggtagagcactctcctgcggagccagactcctcctcgggaaccggaaaagcgggccagcagcctgcaagaaagagattgaatttcggtcagactggagacgcagactccgtacctgacccccagcctctcggacagccaccagcagcccccacaagtttgggatctactacaatggctacaggcagtggcgcaccaatggcagacaataacgagggtgccgatggagtgggtaattcctcaggaaattggcattgcgattcccaatggctgggcgacagagtcatcaccaccagcacccgaacctgggccctgcccacctacaacaaccacctctacaagcaaatctccagccaatcaggagcatcgaacgacaaccactactttggctacagcaccccttgggggtattttgacttcaacagattccactgtcacttctccccacgtgactggcaaagactcatcaacaacaactggggattccgacccaagagactcaacttcaagctctttaacattcaagtcaaagaggtcacgcagaatgacggtacgacgacgattgccaataaccttaccagcacggttcaggtgtttactgactcggagtaccagctcccgtacgtcctcggctcggcgcatcaaggatgcctcccgccgtttccagcggacgtcttcatggtcccacagtatggatacctcaccctgaacaacgggagtcaggcggtaggacgctcttccttttactgcctggagtactttccttctcagatgctgcgtaccggaaacaactttaccttcagctacacctttgaggacgtgcctttccacagcagctacgctcacagccagagtttggaccggctgatgaatcctctgatcgaccagtatctgtattatctgaacaggacacaatcaaatagtggaactcttcagcagtctaggctactgtttagccaagctggacccaccagcatgtctcttcaagctaaaaactggctgcctggaccttgctacagacagcagcgtctgtcaaagcaggcaaacgacaacaacaacagcaactttccctggactgcggctacaaagtatcatctaaatggtcgggactcgttggttaatccaggaccagctatggccagccacaaagacgatgaagaaaagtttttccccatgcatggaaccctgatatttggtaaacaaggaacaaatgctaacgacgcggatttggaacatgtcatgattacagatgaagaagaaatcaggaccaccaatcccgtggctacagagcagtacggaaacgtgtcaaataatttgcaaaactcaaatactggtccaactacagaaaatgtcaatcaccagggagcgttacctggtatggtgtggcaggatcgagacgtgtacctgcagggacccatttgggccaagattcctcacaccgacggacactttcacccttctccactgatgggaggttttggactcaaacacccgcctcctcaaatcatgatcaaaaacactcctgttccagccaatcctcctacaaacttcagcgcggcaaagtttgcttccttcatcacacagtattccacgggacgggtcagcgtggagatcgagtgggagctgcagaaggagaacagcaaacgctggaaccccgagatccagtacacttccaactacaacaaatctgttaatgtggactttactgtggacactaatggtgtgtattcagagcctcgccccattggcaccagatacctgactcgtaatctgtaa

SEQ ID NO: 2144 - DNA, 2208 bp, Artificial Sequence
  Synthetic Polynucleotide
atggctgccgatggttatcttccagattggctcgaggacactctctctgaaggaataagacagtggtggaagctcaaacctggcccaccaccaccaaagcccgcagagcggcatcaggacgacagcaggggtcttgtgcttcctgggtacaagtacctcggacccttcaacggactcgacaaaggagagccggtcaacgaggcagacgctgcggccctcgagcacgacaaggcctacgaccggcagctcgacagcggagacaacccgtacctcaagtacaaccacgccgacgcggagtttcaggagcgtcttaaagaagatacgtcttttgggggcaacctcggacgagcagtcttccgggcgaaaaagagggttcttgaacctctgggcctggttgaggaacctgttaagacggctccgggaaaaaagaggccggtagagcactctcctgcggagccagactcctcctcgggaaccggaaaagcgggccagcagcctgcaagaaagagattgaatttcggtcagactggagacgcagactccgtacctgacccccagcctctcggacagccaccagcagcccccacaagtttgggatctactacaatggctacaggcagtggcgcaccaatggcagacaataacgagggtgccgatggagtgggtaattcctcaggaaattggcattgcgattcccaatggctgggcgacagagtcatcaccaccagcacccgaacctgggccctgcccacctacaacaaccacctctacaagcaaatctccagccaatcaggagcatcgaacgacaaccactactttggctacagcaccccttgggggtattttgacttcaacagattccactgtcacttctccccacgtgactggcaaagactcatcaacaacaactggggattccgacccaagagactcaacttcaagctctttaacattcaagtcaaagaggtcacgcagaatgacggtacgacgacgattgccaataaccttaccagcacggttcaggtgtttactgactcggagtaccagctcccgtacgtcctcggctcggcgcatcaaggatgcctcccgccgtttccagcggacgtcttcatggtcccacagtatggatacctcaccctgaacaacgggagtcaggcggtaggacgctcttccttttactgcctggagtactttccttctcagatgctgcgtaccggaaacaactttaccttcagctacacctttgaggacgtgcctttccacagcagctacgctcacagccagagtttggaccggctgatgaatcctctgatcgaccagtatctgtattatctgaacaggacacaatcaaatagtggaactcttcagcagtctaggctactgtttagccaagctggacccaccagcatgtctcttcaagctaaaaactggctgcctggaccttgctacagacagcagcgtctgtcaaagcaggcaaacgacaacaacaacagcaactttccctggactgcggctacaaagtatcatctaaatggtcgggactcgttggttaatccaggaccagctatggccagccacaaagacgatgaagaaaagtttttccccatgcatggaaccctgatatttggtaaacaaggaacaaatgctaacgacgcggatttggaacatgtcatgattacagatgaagaagaaatcaggaccaccaatcccgtggctacagagcagtacggaaacgtgtcaaataatttgcaaaactcaaatactggtccaactacagaaaatgtcaatcaccagggagcgttacctggtatggtgtggcaggatcgagacgtgtacctgcagggacccatttgggccaagattcctcacaccgacggacactttcacccttctccactgatgggaggttttggactcaaacacccgcctcctcaaatcatgatcaaaaacactcctgttccagccaatcctcctacaaacttcagcgcggcaaagtttgcttccttcatcacacagtattccacgggacaggtcagcgtggagatcgagtgggagctgcagaaggagaacagcaaacgctggaaccccgagatccagtacacttccaactacaacaaatctgttaatgtggactttactgtggacactaatggtgtgtattcagagcctcgccccattggcaccagatacctgactcgtaatctgtaa

SEQ ID NO: 2145 - DNA, 2208 bp, Artificial Sequence
  Synthetic Polynucleotide
atggctgccgatggttatcttccagattggctcgaggacactctctctgaaggaataagacagtggtggaagcccaaacctggcccaccaccaccaaagcccgcagagcggcatcaggacgacagcaggggtcttgtgcttcctgggtacaagtacctcggacccttcaacggactcgacaaaggagagccggtcaacgaggcagacgctgcggccctcgagcacgacaaggcctacgaccggcagctcgacagcggagacaacccgtacctcaagtacaaccacgccgacgcggagtttcaggagcgtcttaaagaagatacgtcttttgggggcaacctcggacgagcagtcttccaggcgaaaaagagggttcttgaacctctgggcctggttgaggaacctgttaagacggctccgggaaaaaagaggccggtagagcactctcctgcggagccagactcctcctcgggaaccggaaaagcgggccagcagcctgcaagaaagagattgaatttcggtcagactggagacgcagactccgtacctgacccccagcctctcggacagccaccagcagcccccacaagtttgggatctactacaatggctacaggcagtggcgcaccaatggcagacaataacgagggtgccgatggagtgggtaattcctcaggaaattggcattgcgattcccaatggctgggcgacagagtcatcaccaccagcacccgaacctgggccctgcccacctacaacaaccacctctacaagcaaatctccagccaatcaggagcatcgaacgacaaccactactttggctacagcaccccttgggggtattttgacttcaacagattccactgtcacttctccccacgtgactggcaaagactcatcaacaacaactggggattccgacccaagagactcaacttcaagctctttaacattcaagtcaaagaggtcacgcagaatgacggtacgacgacgattgccaataaccttaccagcacggttcaggtgtttactgactcggagtaccagctcccgtacgtcctcggctcggcgcatcaaggatgcctcccgccgtttccagcggacgtcttcatggtcccacagtatggatacctcaccctgaacaacgggagtcaggcggtaggacgctcttccttttactgcctggagtactttccttctcagatgctgcgtaccggaaacaactttaccttcagctacacctttgaggacgtgcctttccacagcagctacgctcacagccagagtttggaccggctgatgaatcctctgatcgaccagtatctgtattatctgaacaggacacaatcaaatagtggaactcttcagcagtctaggctactgtttagccaagctggacccaccagcatgtctcttcaagctaaaaactggctgcctggaccttgctacagacagcagcgtctgtcaaagcaggcaaacgacaacaacaacagcaactttccctggactgcggctacaaagtatcatctaaatggtcgggactcgttggttaatccaggaccagctatggccagccacaaagacgatgaagaaaagtttttccccatgcatggaaccctgatatttggtaaacaaggaacaaatgctaacgacgcggatttggaacatgtcatgattacagatgaagaagaaatcaggaccaccaatcccgtggctacagagcagtacggaaacgtgtcaaataatttgcaaaactcaaatactggtccaactacagaaaatgtcaatcaccagggagcgttacctggtatggtgtggcaggatcgagacgtgtacctgcagggacccatttgggccaagattcctcacaccgacggacactttcacccttctccactgatgggaggttttggactcaaacacccgcctcctcaaatcatgatcaaaaacactcctgttccagccaatcctcctacaaacttcagcgcggcaaagtttgcttccttcatcacacagtattccacgggacaggtcagcgtggagatcgagtgggagctgcagaaggagaacagcaaacgctggaaccccgagatccagtacacttccaactacaacaaatctgttaatgtggactttactgtggacactaatggtgtgtattcagagcctcgccccattggcaccagatacctgactcgtaatctgtaa

SEQ ID NO: 2146 - DNA, 2208 bp, Artificial Sequence
  Synthetic Polynucleotide
atggctgccgatggttatcttccagattggctcgaggacactctctctgaaggaataagacagtggtggaagctcaaacctggcccaccaccaccaaagcccgcagagcggcatcaggacgacagcaggggtcttgtgcttcctgggtacaagtacctcggacccttcaacggactcgacaaaggagagccggtcaacgaggcagacgctgcggccctcgagcacgacaaggcctacgaccggcagctcgacagcggagacaacccgtacctcaagtacaaccacgccgacgcggagtttcaggagcgtcttaaagaagatacgtcttttgggggcaacctcggacgagcagtcttccaggcgaaaaagagggttcttgaacctctgggcctggttgaggaacctgttaagacggctccgggaaaaaagaggccggtagagcactctcctgcggagccagactcctcctcgggaaccggaaaagcgggccagcagcctgcaagaaagagattgaatttcggtcagactggagacgcagactccgtacctgacccccagcctctcggacagccaccagcagcccccacaagtttgggatctactacaatggctacaggcagtggcgcaccaatggcagacaataacgagggtgccgatggagtgggtaattcctcaggaaattggcattgcgattcccaatggctgggcgacagagtcatcaccaccagcacccgaacctgggccctgcccacctacaacaaccacctctacaagcaaatctccagccaatcaggagcatcgaacgacaaccactactttggctacagcaccccttgggggtattttgacttcaacagattccactgtcacttctccccacgtgactggcaaagactcatcaacaacaactggggattccgacccaagagactcaacttcaagctctttaacattcaagtcaaagaggtcacgcagaatgacggtacgacgacgattgccaataaccttaccagcacggttcaggtgtttactgactcggagtaccagctcccgtacgtcctcggctcggcgcatcaaggatgcctcccgccgtttccagcggacgtcttcatggtcccacagtatggatacctcaccctgaacaacgggagtcaggcggtaggacgctcttccttttactgcctggagtactttccttctcagatgctgcgtaccggaaacaactttaccttcagctacacctttgaggacgtgcctttccacagcagctacgctcacagccagagtttggaccggctgatgaatcctctgatcgaccagtatctgtattatctgaacaggacacaatcaaatagtggaactcttcagcagtctaggctactgtttagccaagctggacccaccagcatgtctcttcaagctaaaaactggctgcctggaccttgctacagacagcagcgtctgtcaaagcaggcaaacgacaacaacaacagcaactttccctggactgcggctacaaagtatcatctaaatggtcgggactcgttggttaatccaggaccagctatggccagccacaaagacgatgaagaaaagtttttccccatgcatggaaccctgatatttggtaaacaaggaacaaatgctaacgacgcggatttggaacatgtcatgattacagatgaagaagaaatcaggaccaccaatcccgtggctacagagcagtacggaaacgtgtcaaataatttgcaaaactcaaatactggtccaactacagaaaatgccaatcaccagggagcgttacctggtatggtgtggcaggatcgagacgtgtacctgcagggacccatttgggccaagattcctcacaccgacggacactttcacccttctccactgatgggaggttttggactcaaacacccgcctcctcaaatcatgatcaaaaacactcctgttccagccaatcctcctacaaacttcagcgcggcaaagtttgcttccttcatcacacagtattccacgggacaggtcagcgtggagatcgagtgggagctgcagaaggagaacagcaaacgctggaaccccgagatccagtacacttccaactacaacaaatctgttaatgtggactttactgtggacactaatggtgtgtattcagagcctcgccccattggcaccagatacctgactcgtaatctgtaa

SEQ ID NO: 2147 - DNA, 2208 bp, Artificial Sequence
  Synthetic Polynucleotide
atggctgccgatggttatcttccagattggctcgaggacactccctctgaaggaataagacagtggtggaagctcaaacctggcccaccaccaccaaagcccgcagagcggcatcaggacgacagcaggggtcttgtgcttcctgggtacaagtacctcggacccttcaacggactcgacaaaggagagccggtcaacgaggcagacgctgcggccctcgagcacgacaaggcctacgaccggcagctcgacagcggagacaacccgtacctcaagtacaaccacgccgacgcggagtttcaggagcgtcttaaagaagatacgtcttttgggggcaacctcggacgagcagtcttccaggcgaaaaagagggttcttgaacctctgggcctggttgaggaacctgttaagacggctccgggaaaaaagaggccggtagagcactctcctgcggagccagactcctcctcgggaaccggaaaagcgggccagcagcctgcaagaaagagattgaatttcggtcagactggagacgcagactccgtacctgacccccagcctctcggacagccaccagcagcccccacaagtttgggatctactacaatggctacaggcagtggcgcaccaatggcagacaataacgagggtgccgatggagtgggtaattcctcaggaaattggcattgcgattcccaatggctgggcgacagagtcatcaccaccagcacccgaacctgggccctgcccacctacaacaaccacctctacaagcaaatctccagccaatcaggagcatcgaacgacaaccactactttggctacagcaccccttgggggtattttgacttcaacagattccactgtcacttctccccacgtgactggcaaagactcatcaacaacaactggggattccgacccaagagactcaacttcaagctctttaacattcaagtcaaagaggtcacgcagaatgacggtacgacgacgattgccaataaccttaccagcacggttcaggtgtttactgactcggagtaccagctcccgtacgtcctcggctcggcgcatcaaggatgcctcccgccgtttccagcggacgtcttcatggtcccacagtatggatacctcaccctgaacaacgggagtcaggcggtaggacgctcttccttttactgcctggagtactttccttctcagatgctgcgtaccggaaacaactttaccttcagctacacctttgaggacgtgcctttccacagcagctacgctcacagccagagtttggaccggctgatgaatcctctgatcgaccagtatctgtattatctgaacaggacacaatcaaatagtggaactcttcagcagtctaggctactgtttagccaagctggacccaccagcatgtctcttcaagctaaaaactggctgcctggaccttgctacagacagcagcgtctgtcaaagcaggcaaacgacaacaacaacagcaactttccctggactgcggctacaaagtatcatctaaatggtcgggactcgttggttaatccaggaccagctatggccagccacaaagacgatgaagaaaagtttttccccatgcatggaaccctgatatttggtaaacaaggaacaaatgctaacgacgcggatttggaacatgtcatgattacagatgaagaagaaatcaggaccaccaatcccgtggctacagagcagtacggaaacgtgtcaaataatttgcaaaactcaaatactggtccaactacagaaaatgtcaatcaccagggagcgttacctggtatggtgtggcaggatcgagacgtgtacctgcagggacccatttgggccaagattcctcacaccgacggacactttcacccttctccactgatgggaggttttggactcaaacacccgcctcctcaaatcatgatcaaaaacactcctgttccagccaatcctcctacaaacttcagcgcggcaaagtttgcttccttcatcacacagtattccacgggacaggtcagcgtggagatcgagtgggagctgcagaaggagaacagcaaacgctggaaccccgagatccagtacacttccaactacaacaaatctgttaatgtggactttactgtggacactaatggtgtgtattcagagcctcgccccattggcaccagatacctgactcgtaatctgtaa

SEQ ID NO: 2148 - DNA, 2208 bp, Artificial Sequence
  Synthetic Polynucleotide
atggctgccgatggttatcttccagattggctcgaggacactctctctgaaggaataagacagtggtggaagctcaaacctggcccaccaccaccaaagcccgcagagcggcatcaggacgacagcaggggtcttgtgcttcctgggtacaagtacctcggacccttcaacggactcgacaaaggagagccggtcaacgaggcagacgctgcggccctcgagcacgacaaggcctacgaccggcagctcgacagcggagacaacccgtacctcaagtacaaccacgccgacgcggagtttcaggagcgtcttaaagaagatacgtcttttgggggcaacctcggacgagcagtcttccaggcgaaaaagagggttcttgaacctctgggcctggttgaggaacctgttaagacggctccgggaaaaaagaggccggtagagcactctcctgcggagccagactcctcctcgggaaccggaaaagcgggccagcagcctgcaagaaagagattgaatttcggtcagactggagacgcagactccgtacctgacccccagcctctcggacagccaccagcagcccccacaagtttgggatctactacaatggctacaggcagtggcgcaccaatggcagacaataacgagggtgccgatggagtgggtaattcctcaggaaattggcattgcgattcccaatggctgggcgacagagtcatcaccaccagcacccgaacctgggccctgcccacctacaacaaccacctctacaagcaaatctccagccaatcaggagcatcgaacgacaaccactactttggctacagcaccccttgggggtattttgacttcaacagattccactgtcacttctccccacgtgactggcaaagactcatcaacaacaactggggattccgacccaagagactcaacttcaggctctttaacattcaagtcaaagaggtcacgcagaatgacggtacgacgacgattgccaataaccttaccagcacggttcaggtgtttactgactcggagtaccagctcccgtacgtcctcggctcggcgcatcaaggatgcctcccgccgtttccagcggacgtcttcatggtcccacagtatggatacctcaccctgaacaacgggagtcaggcggtaggacgctcttccttttactgcctggagtactttccttctcagatgctgcgtaccggaaacaactttaccttcagctacacctttgaggacgtgcctttccacagcagctacgctcacagccagagtttggaccggctgatgaatcctctgatcgaccagtatctgtattatctgaacaggacacaatcaaatagtggaactcttcagcagtctaggctactgtttagccaagctggacccaccagcatgtctcttcaagctaaaaactggctgcctggaccttgctacagacagcagcgtctgtcaaagcaggcaaacgacaacaacaacagcaactttccctggactgcggctacaaagtatcatctaaatggtcgggactcgttggttaatccaggaccagctatggccagccacaaagacgatgaagaaaagtttttccccatgcatggaaccctgatatttggtaaacaaggaacaaatgctaacgacgcggatttggaacatgtcatgattacagatgaagaagaaatcaggaccaccaatcccgtggctacagagcagtacggaaacgtgtcaaataatttgcaaaactcaaatactggtccaactacagaaaatgtcaatcaccagggagcgttacctggtatggtgtggcaggatcgagacgtgtacctgcagggacccatttgggccaagattcctcacaccgacggacactttcacccttctccactgatgggaggttttggactcaaacacccgcctcctcaaatcatgatcaaaaacactcctgttccagccaatcctcctacaaacttcagcgcggcaaagtttgcttccttcatcacacagtattccacgggacaggtcagcgtggagatcgagtgggagctgcagaaggagaacagcaaacgctggaaccccgagatccagtacacttccaactacaacaaatctgttaatgtggactttactgtggacactaatggtgtgtattcagagcctcgccccattggcaccagatacctgactcgtaatctgtaa

SEQ ID NO: 2149 - DNA, 2208 bp, Artificial Sequence
  Synthetic Polynucleotide
atggctgccgatggttatcttccagattggctcgaggacactctctctgaaggaataagacagtggtggaagctcaaacctggcccaccaccaccaaagcccgcagagcggcatcaggacgacagcaggggtcttgtgcttcctgggtacaagtacctcggacccttcaacggactcgacaaaggagagccggtcaacgaggcagacgctgcggccctcgagcacgacaaggcctacgaccggcagctcgacagcggagacaacccgtacctcaagtacaaccacgccgacgcggagtttcaggagcgtcttaaagaagatacgtcttttgggggcaacctcggacgagcagtcttccaggcgaaaaagagggttcttgaacctctgggcctggttgaggaacctgttaagacggctccgggaaaaaagaggccggtagagcactctcctgcggagccagactcctcctcgggaaccggaaaagcgggccagcagcctgcaagaaagagattgaatttcggtcaggctggagacgcagactccgtacctgacccccagcctctcggacagccaccagcagcccccacaagtttgggatctactacaatggctacaggcagtggcgcaccaatggcagacaataacgagggtgccgatggagtgggtaattcctcaggaaattggcattgcgattcccaatggctgggcgacagagtcatcaccaccagcacccgaacctgggccctgcccacctacaacaaccacctctacaagcaaatctccagccaatcaggagcatcgaacgacaaccactactttggctacagcaccccttgggggtattttgacttcaacagattccactgtcacttctccccacgtgactggcaaagactcatcaacaacaactggggattccgacccaagagactcaacttcaagctctttaacattcaagtcaaagaggtcacgcagaatgacggtacgacgacgattgccaataaccttaccagcacggttcaggtgtttactgactcggagtaccagctcccgtacgtcctcggctcggcgcatcaaggatgcctcccgccgtttccagcggacgtcttcatggtcccacagtatggatacctcaccctgaacaacgggagtcaggcggtaggacgctcttccttttactgcctggagtactttccttctcagatgctgcgtaccggaaacaactttaccttcagctacacctttgaggacgtgcctttccacagcagctacgctcacagccagagtttggaccggctgatgaatcctctgatcgaccagtatctgtattatctgaacaggacacaatcaaatagtggaactcttcagcagtctaggctactgtttagccaagctggacccaccagcatgtctcttcaagctaaaaactggctgcctggaccttgctacagacagcagcgtctgtcaaagcaggcaaacgacaacaacaacagcaactttccctggactgcggctacaaagtatcatctaaatggtcgggactcgttggttaatccaggaccagctatggccagccacaaagacgatgaagaaaagtttttccccatgcatggaaccctgatatttggtaaacaaggaacaaatgctaacgacgcggatttggaacatgtcatgattacagatgaagaagaaatcaggaccaccaatcccgtggctacagagcagtacggaaacgtgtcaaataatttgcaaaactcaaatactggtccaactacagaaaatgtcaatcaccagggagcgttacctggtatggtgtggcaggatcgagacgtgtacctgcagggacccatttgggccaagattcctcacaccgacggacactttcacccttctccactgatgggaggttttggactcaaacacccgcctcctcaaatcatgatcaaaaacactcctgttccagccaatcctcctacaaacttcagcgcggcaaagtttgcttccttcatcacacagtattccacgggacaggtcagcgtggagatcgagtgggagctgcagaaggagaacagcaaacgctggaaccccgagatccagtacacttccaactacaacaaatctgttaatgtggactttactgtggacactaatggtgtgtattcagagcctcgccccattggcaccagatacctgactcgtaatctgtaa

SEQ ID NO: 2150 - DNA, 2208 bp, Artificial Sequence
  Synthetic Polynucleotide
atggctgccgatggttatcttccagattggctcgaggacactctctctgaaggaataagacagtggtggaagctcaaacctggcccaccaccaccaaagcccgcagagcggcatcaggacgacagcaggggtcttgtgcttcctgggtacaagtacctcggacccttcaacggactcgacaaaggagagccggtcaacgaggcagacgctgcggccctcgagcacgacaaggcctacgaccggcagctcgacagcggagacaacccgtacctcaagtacaaccacgccgacgcggagtttcaggagcgtcttaaagaagatacgtcttttgggggcaacctcggacgagcagtcttccaggcgaaaaagagggttcttgaacctctgggcctggttgaggaacctgttaagacggctccgggaaaaaagaggccggtagagcactctcctgcggagccagactcctcctcgggaaccggaaaagcgggccagcagcctgcaagaaagagattgaatttcggtcagactggagacgcagactccgtacctgacccccagcctctcggacagccaccagcagcccccacaagtttgggatctactacagtggctacaggcagtggcgcaccaatggcagacaataacgagggtgccgatggagtgggtaattcctcaggaaattggcattgcgattcccaatggctgggcgacagagtcatcaccaccagcacccgaacctgggccctgcccacctacaacaaccacctctacaagcaaatctccagccaatcaggagcatcgaacgacaaccactactttggctacagcaccccttgggggtattttgacttcaacagattccactgtcacttctccccacgtgactggcaaagactcatcaacaacaactggggattccgacccaagagactcaacttcaagctctttaacattcaagtcaaagaggtcacgcagaatgacggtacgacgacgattgccaataaccttaccagcacggttcaggtgtttactgactcggagtaccagctcccgtacgtcctcggctcggcgcatcaaggatgcctcccgccgtttccagcggacgtcttcatggtcccacagtatggatacctcaccctgaacaacgggagtcaggcggtaggacgctcttccttttactgcctggagtactttccttctcagatgctgcgtaccggaaacaactttaccttcagctacacctttgaggacgtgcctttccacagcagctacgctcacagccagagtttggaccggctgatgaatcctctgatcgaccagtatctgtattatctgaacaggacacaatcaaatagtggaactcttcagcagtctaggctactgtttagccaagctggacccaccagcatgtctcttcaagctaaaaactggctgcctggaccttgctacagacagcagcgtctgtcaaagcaggcaaacgacaacaacaacagcaactttccctggactgcggctacaaagtatcatctaaatggtcgggactcgttggttaatccaggaccagctatggccagccacaaagacgatgaagaaaagtttttccccatgcatggaaccctgatatttggtaaacaaggaacaaatgctaacgacgcggatttggaacatgtcatgattacagatgaagaagaaatcaggaccaccaatcccgtggctacagagcagtacggaaacgtgtcaaataatttgcaaaactcaaatactggtccaactacagaaaatgtcaatcaccagggagcgttacctggtatggtgtggcaggatcgagacgtgtacctgcagggacccatttgggccaagattcctcacaccgacggacactttcacccttctccactgatgggaggttttggactcaaacacccgcctcctcaaatcatgatcaaaaacactcctgttccagccaatcctcctacaaacttcagcgcggcaaagtttgcttccttcatcacacagtattccacgggacaggtcagcgtggagatcgagtgggagctgcagaaggagaacagcaaacgctggaaccccgagatccagtacacttccaactacaacaaatctgttaatgtggactttactgtggacactaatggtgtgtattcagagcctcgccccattggcaccagatacctgactcgtaatctgtaa

SEQ ID NO: 2151 - DNA, 2208 bp, Artificial Sequence
  Synthetic Polynucleotide
atggctgccgatggttatcttccagattggctcgaggacactctctctgaaggaataagacagtggtggaagctcaaacctggcccaccaccaccaaagcccgcagagcggcatcaggacgacagcaggggtcttgtgcttcctgggtacaagtacctcggacccttcaacggactcgacaaaggagagccggtcaacgaggcagacgctgcggccctcgagcacgacaaggcctacgaccggcagctcgacagcggagacaacccgtacctcaagtacaaccacgccgacgcggagtttcaggagcgtcttaaagaagatacgtcttttgggggcaacctcggacgagcagtcttccaggcgaaaaagagggttcttgaacctctgggcctggttgaggaacctgttaagacggctccgggaaaaaagaggccggtagagcactctcctgcggagccagactcctcctcgggaaccggaaaagcgggccagcagcctgcaagaaagagattgaatttcggtcagactggagacgcagactccgtacctgacccccagcctctcggacagccaccagcagcccccacaagtttgggatctactacaatggctacaggcagtggcgcaccaatggcagacaataacgagggtgccgatggagtgggtaattcctcaggaaattggcattgcgattcccaatggctgggcgacagagtcatcaccaccagcacccgaacctgggccctgcccacctacaacaaccacctctacaagcaaatctccagccaatcaggagcatcgaacgacaaccactactttggctacagcaccccttgggggtattttgacttcaacagattccactgtcacttctccccacgtgactggcaaagactcatcaacaacaactggggattccgacccaagagactcaacttcaagctctttaacattcaagtcaaagaggtcacgcagaatgacggtacgacgacgattgccaataaccttaccagcacggttcaggtgtttactgactcggagtaccagctcccgtacgtcctcggctcggcgcatcaaggatgcctcccgccgtttccagcggacgtcttcatggtcccacagtatggatacctcaccctgaacaacgggagtcaggcggtaggacgctcttccttttactgcctggagtactttccttctcagatgctgcgtaccggaaacaactttaccttcagctacacctttgaggacgtgcctttccacagcagctacgctcacagccagagtttggaccggctgatgaatcctctgatcgaccagtatctgtattatctgaacaggacacaatcaaatagtggaactcttcagcagtctaggctactgtttagccaagctggacccaccagcatgtctcttcaagctaaaaactggctgcctggaccttgctacagacagcagcgtctgtcaaagcaggcaaacgacaacaacaacagcaactttccctggactgcggctacaaagtatcatctaaatggtcgggactcgttggttaatccaggaccagctatggccagccacaaaggcgatgaagaaaagtttttccccatgcatggaaccctgatatttggtaaacaaggaacaaatgctaacgacgcggatttggaacatgtcatgattacagatgaagaagaaatcaggaccaccaatcccgtggctacagagcagtacggaaacgtgtcaaataatttgcaaaactcaaatactggtccaactacagaaaatgtcaatcaccagggagcgttacctggtatggtgtggcaggatcgagacgtgtacctgcagggacccatttgggccaagattcctcacaccgacggacactttcacccttctccactgatgggaggttttggactcaaacacccgcctcctcaaatcatgatcaaaaacactcctgttccagccaatcctcctacaaacttcagcgcggcaaagtttgcttccttcatcacacagtattccacgggacaggtcagcgtggagatcgagtgggagctgcagaaggagaacagcaaacgctggaaccccgagatccagtacacttccaactacaacaaatctgttaatgtggactttactgtggacactaatggtgtgtattcagagcctcgccccattggcaccagatacctgactcgtaatctgtaa

SEQ ID NO: 2152 - DNA, 2208 bp, Artificial Sequence
  Synthetic Polynucleotide
atggctgccgatggttatcttccagattggctcgaggacactctctctgaaggaataagacagtggtggaagctcaaacctggcccaccaccaccaaagcccgcagagcggcatcaggacgacagcaggggtcttgtgcttcctgggtacaagtacctcggacccttcaacggactcgacaaaggagagccggtcaacgaggcagacgctgcggccctcgagcacgacaaggcctacgaccggcagctcgacagcggagacaacccgtacctcaagtacaaccacgccgacgcggagtttcaggagcgtcttaaagaagatacgtcttttgggggcaacctcggacgagcagtcttccaggcgaaaaagagggttcttgaacctctgggcctggttgaggaacctgttaagacggctccgggaaaaaagaggccggtagagcactctcctgcggagccagactcctcctcgggaaccggaaaagcgggccagcagcctgcaagaaagggattgaatttcggtcagactggagacgcagactccgtacctgacccccagcctctcggacagccaccagcagcccccacaagtttgggatctactacaatggctacaggcagtggcgcaccaatggcagacaataacgagggtgccgatggagtgggtaattcctcaggaaattggcattgcgattcccaatggctgggcgacagagtcatcaccaccagcacccgaacctgggccctgcccacctacaacaaccacctctacaagcaaatctccagccaatcaggagcatcgaacgacaaccactactttggctacagcaccccttgggggtattttgacttcaacagattccactgtcacttctccccacgtgactggcaaagactcatcaacaacaactggggattccgacccaagagactcaacttcaagctctttaacattcaagtcaaagaggtcacgcagaatgacggtacgacgacgattgccaataaccttaccagcacggttcaggtgtttactgactcggagtaccagctcccgtacgtcctcggctcggcgcatcaaggatgcctcccgccgtttccagcggacgtcttcatggtcccacagtatggatacctcaccctgaacaacgggagtcaggcggtaggacgctcttccttttactgcctggagtactttccttctcagatgctgcgtaccggaaacaactttaccttcagctacacctttgaggacgtgcctttccacagcagctacgctcacagccagagtttggaccggctgatgaatcctctgatcgaccagtatctgtattatctgaacaggacacaatcaaatagtggaactcttcagcagtctaggctactgtttagccaagctggacccaccagcatgtctcttcaagctaaaaactggctgcctggaccttgctacagacagcagcgtctgtcaaagcaggcaaacgacaacaacaacagcaactttccctggactgcggctacaaagtatcatctaaatggtcgggactcgttggttaatccaggaccagctatggccagccacaaagacgatgaagaaaagtttttccccatgcatggaaccctgatatttggtaaacaaggaacaaatgctaacgacgcggatttggaacatgtcatgattacagatgaagaagaaatcaggaccaccaatcccgtggctacagagcagtacggaaacgtgtcaaataatttgcaaaactcaaatactggtccaactacagaaaatgtcaatcaccagggagcgttacctggtatggtgtggcaggatcgagacgtgtacctgcagggacccatttgggccaagattcctcacaccgacggacactttcacccttctccactgatgggaggttttggactcaaacacccgcctcctcaaatcatgatcaaaaacactcctgttccagccaatcctcctacaaacttcagcgcggcaaagtttgcttccttcatcacacagtattccacgggacaggtcagcgtggagatcgagtgggagctgcagaaggagaacagcaaacgctggaaccccgagatccagtacacttccaactacaacaaatctgttaatgtggactttactgtggacactaatggtgtgtattcagagcctcgccccattggcaccagatacctgactcgtaatctgtaa

SEQ ID NO: 2153 - DNA, 2208 bp, Artificial Sequence
  Synthetic Polynucleotide
atggctgccgatggttatcttccagattggctcgaggacactctctctgaaggaataagacagtggtggaagctcaaacctggcccaccaccaccaaagcccgcagagcggcatcaggacgacagcaggggtcttgtgcttcctgggtacaagtacctcggacccttcaacggactcgacaaaggagagccggtcaacgaggcagacgctgcggccctcgagcacgacaaggcctacgaccggcagctcgacagcggagacaacccgtacctcaagtacaaccacgccgacgcggagtttcaggagcgtcttaaagaagatacgtcttttgggggcaacctcggacgagcagtcttccaggcgaaaaagagggttcttgaacctctgggcctggttgaggaacctgttaagacggctccgggaaaaaagaggccggtagagcactctcctgcggagccagactcctcctcgggaaccggaaaagcgggccagcagcctgcaagaaagagattgaatttcggtcagactggagacgcagactccgtacctgacccccagcctctcggacagccaccagcagcccccacaagtttgggatctactacaatggctacaggcagtggcgcaccaatggcagacaataacgagggtgccgatggagtgggtaattcctcaggaaattggcattgcgattcccaatggctgggcgacagagtcatcaccaccagcacccgaacctgggccctgcccacctacaacaaccacctctacaagcaaatctccagccaatcaggagcatcgaacgacaaccactactttggctacagcaccccttgggggtattttgacttcaacagattccactgtcacttctccccacgtgactggcaaagactcatcaacaacaactggggattccgacccaagagactcaacttcaagctctttaacattcaagtcaaagaggtcacgcagaatgacggtacggcgacgattgccaataaccttaccagcacggttcaggtgtttactgactcggagtaccagctcccgtacgtcctcggctcggcgcatcaaggatgcctcccgccgtttccagcggacgtcttcatggtcccacagtatggatacctcaccctgaacaacgggagtcaggcggtaggacgctcttccttttactgcctggagtactttccttctcagatgctgcgtaccggaaacaactttaccttcagctacacctttgaggacgtgcctttccacagcagctacgctcacagccagagtttggaccggctgatgaatcctctgatcgaccagtatctgtattatctgaacaggacacaatcaaatagtggaactcttcagcagtctaggctactgtttagccaagctggacccaccagcatgtctcttcaagctaaaaactggctgcctggaccttgctacagacagcagcgtctgtcaaagcaggcaaacgacaacaacaacagcaactttccctggactgcggctacaaagtatcatctaaatggtcgggactcgttggttaatccaggaccagctatggccagccacaaagacgatgaagaaaagtttttccccatgcatggaaccctgatatttggtaaacaaggaacaaatgctaacgacgcggatttggaacatgtcatgattacagatgaagaagaaatcaggaccaccaatcccgtggctacagagcagtacggaaacgtgtcaaataatttgcaaaactcaaatactggtccaactacagaaaatgtcaatcaccagggagcgttacctggtatggtgtggcaggatcgagacgtgtacctgcagggacccatttgggccaagattcctcacaccgacggacactttcacccttctccactgatgggaggttttggactcaaacacccgcctcctcaaatcatgatcaaaaacactcctgttccagccaatcctcctacaaacttcagcgcggcaaagtttgcttccttcatcacacagtattccacgggacaggtcagcgtggagatcgagtgggagctgcagaaggagaacagcaaacgctggaaccccgagatccagtacacttccaactacaacaaatctgttaatgtggactttactgtggacactaatggtgtgtattcagagcctcgccccattggcaccagatacctgactcgtaatctgtaa

SEQ ID NO: 2154 - DNA, 2208 bp, Artificial Sequence
  Synthetic Polynucleotide
atggctgccgatggttatcttccagattggctcgaggacactctctctgaaggaataagacagtggtggaagctcaaacctggcccaccaccaccaaagcccgcagagcggcatcaggacgacagcaggggtcttgtgcttcctgggtacaagtacctcggacccttcaacggactcgacaaaggagagccggtcaacgaggcagacgctgcggccctcgagcacgacaaggcctacgaccggcagctcgacagcggagacaacccgtacctcaagtacaaccacgccgacgcggagtttcaggagcgtcttaaagaagatacgtcttttgggggcaacctcggacgagcagtcttccaggcgaaaaagagggttcttgaacctctgggcctggttgaggaacctgttaagacggctccgggaaaaaagaggccggtagagcactctcctgcggagccagactcctcctcgggaaccggaaaagcgggccagcagcctgcaagaaggagattgaatttcggtcagactggagacgcagactccgtacctgacccccagcctctcggacagccaccagcagcccccacaagtttgggatctactacaatggctacaggcagtggcgcaccaatggcagacaataacgagggtgccgatggagtgggtaattcctcaggaaattggcattgcgattcccaatggctgggcgacagagtcatcaccaccagcacccgaacctgggccctgcccacctacaacaaccacctctacaagcaaatctccagccaatcaggagcatcgaacgacaaccactactttggctacagcaccccttgggggtattttgacttcaacagattccactgtcacttctccccacgtgactggcaaagactcatcaacaacaactggggattccgacccaagagactcaacttcaagctctttaacattcaagtcaaagaggtcacgcagaatgacggtacgacgacgattgccaataaccttaccagcacggttcaggtgtttactgactcggagtaccagctcccgtacgtcctcggctcggcgcatcaaggatgcctcccgccgtttccagcggacgtcttcatggtcccacagtatggatacctcaccctgaacaacgggagtcaggcggtaggacgctcttccttttactgcctggagtactttccttctcagatgctgcgtaccggaaacaactttaccttcagctacacctttgaggacgtgcctttccacagcagctacgctcacagccagagtttggaccggctgatgaatcctctgatcgaccagtatctgtattatctgaacaggacacaatcaaatagtggaactcttcagcagtctaggctactgtttagccaagctggacccaccagcatgtctcttcaagctaaaaactggctgcctggaccttgctacagacagcagcgtctgtcaaagcaggcaaacgacaacaacaacagcaactttccctggactgcggctacaaagtatcatctaaatggtcgggactcgttggttaatccaggaccagctatggccagccacaaagacgatgaagaaaagtttttccccatgcatggaaccctgatatttggtaaacaaggaacaaatgctaacgacgcggatttggaacatgtcatgattacagatgaagaagaaatcaggaccaccaatcccgtggctacagagcagtacggaaacgtgtcaaataatttgcaaaactcaaatactggtccaactacagaaaatgtcaatcaccagggagcgttacctggtatggtgtggcaggatcgagacgtgtacctgcagggacccatttgggccaagattcctcacaccgacggacactttcacccttctccactgatgggaggttttggactcaaacacccgcctcctcaaatcatgatcaaaaacactcctgttccagccaatcctcctacaaacttcagcgcggcaaagtttgcttccttcatcacacagtattccacgggacaggtcagcgtggagatcgagtgggagctgcagaaggagaacagcaaacgctggaaccccgagatccagtacacttccaactacaacaaatctgttaatgtggactttactgtggacactaatggtgtgtattcagagcctcgccccattggcaccagatacctgactcgtaatctgtaa

SEQ ID NO: 2155 - DNA, 2208 bp, Artificial Sequence
  Synthetic Polynucleotide
atggctgccgatggttatcttccagattggctcgaggacactctctctgaaggaataagacagtggtggaagctcaaacctggcccaccaccaccaaagcccgcagagcggcatcaggacgacagcaggggtcttgtgcttcctgggtacaagtacctcggacccttcaacggactcgacaaaggagagccggtcaacgaggcagacgctgcggccctcgagcacgacaaggcctacgaccggcagctcgacagcggagacaacccgtacctcaagtacaaccacgccgacgcggagtttcaggagcgtcttaaagaagatacgtcttttgggggcaacctcggacgagcagtcttccaggcgaaaaagagggttcttgaacctctgggcctggttgaggaacctgttaagacggctccgggaaaaaagaggccggtagagcactctcctgcggagccagactcctcctcgggaaccggaaaagcgggccagcagcctgcaagaaagagattgaatttcggtcagactggagacgcagactccgtacctgacccccagcctctcggacagccaccagcagcccccacaagtttgggatctactacaatggctacaggcagtggcgcaccaatggcagacaataacgagggtgccgatggagtgggtaattcctcaggaaattggcattgcgattcccaatggctgggcgacagagtcatcaccaccagcacccgaacctgggccctgcccacctacaacaaccacctctacaagcaaatctccagccaatcaggagcatcgaacgacaaccactactttggctacagcaccccttgggggtattttgacttcaacagattccactgtcacttctccccacgtgactggcaaagactcatcaacaacaactggggattccgacccaagagactcaacttcaagctctttaacattcaagtcaaagaggtcacgcagaatgacggtacgacgacgattgccaataaccttaccagcacggttcaggtgtttactgactcggagtaccagctcccgtacgtcctcggctcggcgcatcaaggatgcctcccgccgtttccagcggacgtcttcatggtcccacagtatggatacctcaccctgaacaacgggagtcaggcggtaggacgctcttccttttactgcctggagtactttccttctcagatgctgcgtaccggaaacaactttaccttcagctacacctttgaggacgtgcctttccacagcagctacgctcacagccagagtttggaccggctgatgaatcctctgatcgaccagtatctgtattatctgaacaggacacaatcaaatagtggaactcttcagcagtctaggctactgtttagccaagctggacccaccagcatgtctcttcaagctaaaaactggctgcctggaccttgctacagacagcagcgtctgtcaaagcaggcaaacgacaacaacaacagcaactttccctggactgcggctacaaagtatcatctaaatggtcgggactcgttggttaatccaggaccagctatggccagccacaaagacgatgaagaaaagtttttccccatgcatggaaccctgatatttggtaaacaaggaacaaatgctaacgacgcggatttggaacatgtcatgattacagatgaagaagaaatcaggaccaccaatcccgtggctacagagcagtacggaaacgtgtcaaataatttgcaaaactcaaatactggtccaactacagaaaatgtcaatcaccagggagcgttacctggtatggtgtggcaggatcgagacgtgtacctgcagggacccatttgggccaagattcctcacaccgacggacactttcacccttctccactgatgggaggttttggactcaaacacccgcctcctcaaatcatgatcaaaaacactcctgttccagccaatcctcctacaaacttcagcgcggcaaagtttgcttccctcatcacacagtattccacgggacaggtcagcgtggagatcgagtgggagctgcagaaggagaacagcaaacgctggaaccccgagatccagtacacttccaactacaacaaatctgttaatgtggactttactgtggacactaatggtgtgtattcagagcctcgccccattggcaccagatacctgactcgtaatctgtaa

SEQ ID NO: 2156 - DNA, 2208 bp, Artificial Sequence
  Synthetic Polynucleotide
atggctgccgatggttatcttccagattggctcgaggacactctctctgaaggaataagacagtggtggaagctcaaacctggcccaccaccaccaaagcccgcagagcggcatcaggacgacagcaggggtcttgtgcttcctgggtacaagtacctcggacccttcaacggactcgacaaaggagagccggtcaacgaggcagacgctgcggccctcgagcacgacaaggcctacgaccggcagctcgacagcggagacaacccgtacctcaagtacaaccacgccgacgcggagtttcaggagcgtcttaaagaagatacgtcttttgggggcaacctcggacgagcagtcttccaggcgaaaaagagggttcttgaacctctgggcctggttgaggaacctgttaagacggctccgggaaaaaagaggccggtagagcactctcctgcggagccagactcctcctcgggaaccggaaaagcgggccagcagcctgcaagaaagagattgaatttcggtcagactggagacgcagactccgtacctgacccccagcctctcggacagccaccagcagcccccacaagtttgggatctactacaatggctacaggcagtggcgcaccaatggcagacaataacgagggtgccgatggagtgggtaattcctcaggaaattggcattgcgattcccaatggctgggcgacagagtcatcaccaccagcacccgaacctgggccctgcccacctacaacaaccacctctacaagcaaatctccagccaatcaggagcatcgaacgacaaccactactttggctacagcaccccttgggggtattttgacttcaacagattccactgtcacttctccccacgtgactggcaaagactcatcaacaacaactggggattccgacccaagagactcagcttcaagctctttaacattcaagtcaaagaggtcacgcagaatgacggtacgacgacgattgccaataaccttaccagcacggttcaggtgtttactgactcggagtaccagctcccgtacgtcctcggctcggcgcatcaaggatgcctcccgccgtttccagcggacgtcttcatggtcccacagtatggatacctcaccctgaacaacgggagtcaggcggtaggacgctcttccttttactgcctggagtactttccttctcagatgctgcgtaccggaaacaactttaccttcagctacacctttgaggacgtgcctttccacagcagctacgctcacagccagagtttggaccggctgatgaatcctctgatcgaccagtatctgtattatctgaacaggacacaatcaaatagtggaactcttcagcagtctaggctactgtttagccaagctggacccaccagcatgtctcttcaagctaaaaactggctgcctggaccttgctacagacagcagcgtctgtcaaagcaggcaaacgacaacaacaacagcaactttccctggactgcggctacaaagtatcatctaaatggtcgggactcgttggttaatccaggaccagctatggccagccacaaagacgatgaagaaaagtttttccccatgcatggaaccctgatatttggtaaacaaggaacaaatgctaacgacgcggatttggaacatgtcatgattacagatgaagaagaaatcaggaccaccaatcccgtggctacagagcagtacggaaacgtgtcaaataatttgcaaaactcaaatactggtccaactacagaaaatgtcaatcaccagggagcgttacctggtatggtgtggcaggatcgagacgtgtacctgcagggacccatttgggccaagattcctcacaccgacggacactttcacccttctccactgatgggaggttttggactcaaacacccgcctcctcaaatcatgatcaaaaacactcctgttccagccaatcctcctacaaacttcagcgcggcaaagtttgcttccttcatcacacagtattccacgggacaggtcagcgtggagatcgagtgggagctgcagaaggagaacagcaaacgctggaaccccgagatccagtacacttccaactacaacaaatctgttaatgtggactttactgtggacactaatggtgtgtattcagagcctcgccccattggcaccagatacctgactcgtaatctgtaa

SEQ ID NO: 2157 - DNA, 2208 bp, Artificial Sequence
  Synthetic Polynucleotide
atggctgccgatggttatcttccagattggctcgaggacactctctctgaaggaataagacagtggtggaagctcaaacctggcccaccaccaccaaagcccgcagagcggcatcaggacgacagcaggggtcttgtgcttcctgggtacaagtacctcggacccttcaacggactcgacaaaggagagccggtcaacgaggcagacgctgcggccctcgagcacgacaaggcctacgaccggcagctcgacagcggagacaacccgtacctcaagtacaaccacgccgacgcggagtttcaggagcgtcttaaagaagatacgtcttttgggggcaacctcggacgagcagtcttccaggcgaaaaagagggttcttgaacctctgggcctggttgaggaacctgttaagacggctccgggaaaaaagaggccggtagagcactctcctgcggagccagactcctcctcgggaaccggaaaagcgggccagcagcctgcaagaaagagattgaatttcggtcagactggagacgcagactccgtacctgacccccagcctctcggacagccaccagcagcccccacaagtttgggatctactacaatggctacaggcagtggcgcaccaatggcagacaataacgagggtgccgatggagtgggtaattcctcaggaaattggcattgcgattcccaatggctgggcgacagagtcatcaccaccagcacccgaacctgggccctgcccacctacaacaaccacctctacaagcaaatctccagccaatcaggagcatcgaacgacaaccactactttggctacagcaccccttgggggtattttgacttcaacagattccactgtcacttctccccacgtgactggcaaagactcatcaacaacaactggggattccgacccaagagactcaacttcaagctctttaacattcaagtcaaagaggtcacgcagaatgacggtacgacgacgattgccaataaccttaccagcacggttcaggtgtttactgactcggagtaccagctcccgtacgtcctcggctcggcgcatcaaggatgcctcccgccgtttccagcggacgtcttcatggtcccacagtatggatacctcaccctgaacaacgggagtcaggcggtaggacgctcttccttttactgcctggagtactttccttctcagatgctgcgtaccggaaacaactttaccttcagctacacctttgaggacgtgcctttccacagcagctacgctcacagccagagtttggaccggctgatgaatcctctgatcgaccagtatctgtattatctgaacaggacacaatcaaatagtggaactcttcagcagtctaggctactgtttagccaagctggacccaccagcatgtctcttcaagctaaaaactggctgcctggaccttgctacagacagcagcgtctgtcaaagcaggcaaacgacaacaacaacagcaactttccctggactgcggctacaaagtatcatctaaatggtcgggactcgttggttaatccaggaccagctatggccagccacaaagacgatgaagaaaagtttttccccatgcatggaaccctgatatttggtaaacaaggaacaaatgctaacgacgcggatttggaacatgtcatgattacagatgaagaagaaatcaggaccaccaatcccgtggctacagggcagtacggaaacgtgtcaaataatttgcaaaactcaaatactggtccaactacagaaaatgtcaatcaccagggagcgttacctggtatggtgtggcaggatcgagacgtgtacctgcagggacccatttgggccaagattcctcacaccgacggacactttcacccttctccactgatgggaggttttggactcaaacacccgcctcctcaaatcatgatcaaaaacactcctgttccagccaatcctcctacaaacttcagcgcggcaaagtttgcttccttcatcacacagtattccacgggacaggtcagcgtggagatcgagtgggagctgcagaaggagaacagcaaacgctggaaccccgagatccagtacacttccaactacaacaaatctgttaatgtggactttactgtggacactaatggtgtgtattcagagcctcgccccattggcaccagatacctgactcgtaatctgtaa

SEQ ID NO: 2158 - DNA, 2208 bp, Artificial Sequence
  Synthetic Polynucleotide
atggctgccgatggttatcttccagattggctcgaggacactctctctgaaggaataagacagtggtggaagctcaaacctggcccaccaccaccaaagcccgcagagcggcatcaggacgacagcaggggtcttgtgcttcctgggtacaagtacctcggacccttcaacggactcgacaaaggagagccggtcaacgaggcagacgctgcggccctcgagcacgacaaggcctacgaccggcagctcgacagcggagacaacccgtacctcaagtacaaccacgccgacgcggagtttcaggagcgtcttaaagaagatacgtcttttgggggcaacctcggacgagcagtcttccaggcgaaaaagagggttcttgaacctctgggcctggttgaggaacctgttaagacggctccgggaaaaaagaggccggtagagcactctcctgcggagccagactcctcctcgggaaccggaaaagcgggccagcagcctgcaagaaagagattgaatttcggtcagactggagacgcagactccgtacctgacccccagcctctcggacagccaccagcagcccccacaagtttgggatctactacaatggctacaggcagtggcgcaccaatggcagacaataacgagggtgccgatggagtgggtaattcctcaggaaattggcattgcgattcccaatggctgggcgacagagtcatcaccaccagcacccgaacctgggccctgcccacctacaacaaccacctctacaagcaaatctccagccaatcaggagcatcgaacgacaaccactactttggctacagcaccccttgggggtattttgacttcaacagattccactgtcacttctccccacgtgactggcaaagactcatcaacaacaactggggattccgacccaagagactcaacttcaagctctttaacattcaagtcaaagaggtcacgcagaatgacggtacgacgacgattgccaataaccttaccagcacggttcaggtgtttactgactcggagtaccagctcccgtacgtcctcggctcggcgcatcaaggatgcctcccgccgtttccagcggacgtcttcatggtcccacagtatggatacctcaccctgaacaacgggagtcaggcggtaggacgctcttccttttactgcctggagtactttccttctcagatgctgcgtaccggaaacaactttaccttcagctacacctttgaggacgtgcctttccacagcagctacgctcacagccagagtttggaccggctgatgaatcctctgatcgaccagtatctgtattatctgaacaggacacaatcaaatagtggaactcttcagcagtctaggctactgtttagccaagctggacccaccagcatgtctcttcaagctaaaaactggctgcctggaccttgctacagacagcagcgtctgtcaaagcaggcaaacgacaacaacaacagcaactttccctggactgcggctacaaagtatcatctaaatggtcgggactcgttggttaatccaggaccagctatggccagccacaaagacgatgaagaaaagtttttccccatgcatggaaccctgatatttggtaaacaaggaacaaatgctaacgacgcggatttggaacatgtcatgattacagatgaagaagaaatcaggaccaccaatcccgtggctacagagcagtacggaaacgtgccaaataatttgcaaaactcaaatactggtccaactacagaaaatgtcaatcaccagggagcgttacctggtatggtgtggcaggatcgagacgtgtacctgcagggacccatttgggccaagattcctcacaccgacggacactttcacccttctccactgatgggaggttttggactcaaacacccgcctcctcaaatcatgatcaaaaacactcctgttccagccaatcctcctacaaacttcagcgcggcaaagtttgcttccttcatcacacagtattccacgggacaggtcagcgtggagatcgagtgggagctgcagaaggagaacagcaaacgctggaaccccgagatccagtacacttccaactacaacaaatctgttaatgtggactttactgtggacactaatggtgtgtattcagagcctcgccccattggcaccagatacctgactcgtaatctgtaa

SEQ ID NO: 2159 - DNA, 2208 bp, Artificial Sequence
  Synthetic Polynucleotide
atggctgccgatggttatcttccagattggctcgaggacactctctctgaaggaataagacagtggtggaagctcaaacctggcccaccaccaccaaagcccgcagagcggcatcaggacgacagcaggggtcttgtgcttcctgggtacaagtacctcggacccttcaacggactcgacaaaggagagccggtcaacgaggcagacgctgcggccctcgagcacgacaaggcctacgaccggcagctcgacagcggagacaacccgtacctcaagtacaaccacgccgacgcggagtttcaggagcgtcttaaagaagatacgtcttttgggggcaacctcggacgagcagtcttccaggcgaaaaagagggttcttgaacctctgggcctggttgaggaacctgttaagacggctccgggaaaaaagaggccggtagagcactctcctgcggagccagactcctcctcgggaaccggaaaagcgggccagcagcctgcaagaaagagattgaatttcggtcagactggagacgcagactccgtacctgacccccagcctctcggacagccaccagcagcccccacaagtttgggatctactacaatggctacaggcagtggcgcaccaatggcagacaataacgagggtgccgatggagtgggtaattcctcaggaaattggcattgcgattcccaatggctgggcgacagagtcatcaccaccagcacccgaacctgggccctgcccacctacaacaaccacctctacaagcaaatctccagccaatcaggagcatcgaacgacaaccactactttggctacagcaccccttgggggtattttgacttcaacagattccactgtcacttctccccacgtgactggcaaagactcatcaacaacaactggggattccgacccaagagactcaacttcaagctctttaacattcaagtcaaagaggtcacgcagaatgacggtacgacgacgattgccaataaccttaccagcacggttcaggtgtttactgactcggagtaccagctcccgtacgtcctcggctcggcgcatcaaggatgcctcccgccgtttccagcggacgtcttcatggtcccacagtatggatacctcaccccgaacaacgggagtcaggcggtaggacgctcttccttttactgcctggagtactttccttctcagatgctgcgtaccggaaacaactttaccttcagctacacctttgaggacgtgcctttccacagcagctacgctcacagccagagtttggaccggctgatgaatcctctgatcgaccagtatctgtattatctgaacaggacacaatcaaatagtggaactcttcagcagtctaggctactgtttagccaagctggacccaccagcatgtctcttcaagctaaaaactggctgcctggaccttgctacagacagcagcgtctgtcaaagcaggcaaacgacaacaacaacagcaactttccctggactgcggctacaaagtatcatctaaatggtcgggactcgttggttaatccaggaccagctatggccagccacaaagacgatgaagaaaagtttttccccatgcatggaaccctgatatttggtaaacaaggaacaaatgctaacgacgcggatttggaacatgtcatgattacagatgaagaagaaatcaggaccaccaatcccgtggctacagagcagtacggaaacgtgtcaaataatttgcaaaactcaaatactggtccaactacagaaaatgtcaatcaccagggagcgttacctggtatggtgtggcaggatcgagacgtgtacctgcagggacccatttgggccaagattcctcacaccgacggacactttcacccttctccactgatgggaggttttggactcaaacacccgcctcctcaaatcatgatcaaaaacactcctgttccagccaatcctcctacaaacttcagcgcggcaaagtttgcttccttcatcacacagtattccacgggacaggtcagcgtggagatcgagtgggagctgcagaaggagaacagcaaacgctggaaccccgagatccagtacacttccaactacaacaaatctgttaatgtggactttactgtggacactaatggtgtgtattcagagcctcgccccattggcaccagatacctgactcgtaatctgtaa

SEQ ID NO: 2160 - DNA, 2208 bp, Artificial Sequence
  Synthetic Polynucleotide
atggctgccgatggttatcttccagattggctcgaggacactctctctgaaggaataagacagtggtggaagctcaaacctggcccaccaccaccaaagcccgcagagcggcatcaggacgacagcaggggtcttgtgcttcctgggtacaagtacctcggacccttcaacggactcgacaaaggagagccggtcaacgaggcagacgctgcggccctcgagcacgacaaggcctacgaccggcagctcgacagcggagacaacccgtacctcaagtacaaccacgccgacgcggagtttcaggagcgtcttaaagaagatacgtcttttgggggcaacctcggacgagcagccttccaggcgaaaaagagggttcttgaacctctgggcctggttgaggaacctgttaagacggctccgggaaaaaagaggccggtagagcactctcctgcggagccagactcctcctcgggaaccggaaaagcgggccagcagcctgcaagaaagagattgaatttcggtcagactggagacgcagactccgtacctgacccccagcctctcggacagccaccagcagcccccacaagtttgggatctactacaatggctacaggcagtggcgcaccaatggcagacaataacgagggtgccgatggagtgggtaattcctcaggaaattggcattgcgattcccaatggctgggcgacagagtcatcaccaccagcacccgaacctgggccctgcccacctacaacaaccacctctacaagcaaatctccagccaatcaggagcatcgaacgacaaccactactttggctacagcaccccttgggggtattttgacttcaacagattccactgtcacttctccccacgtgactggcaaagactcatcaacaacaactggggattccgacccaagagactcaacttcaagctctttaacattcaagtcaaagaggtcacgcagaatgacggtacgacgacgattgccaataaccttaccagcacggttcaggtgtttactgactcggagtaccagctcccgtacgtcctcggctcggcgcatcaaggatgcctcccgccgtttccagcggacgtcttcatggtcccacagtatggatacctcaccctgaacaacgggagtcaggcggtaggacgctcttccttttactgcctggagtactttccttctcagatgctgcgtaccggaaacaactttaccttcagctacacctttgaggacgtgcctttccacagcagctacgctcacagccagagtttggaccggctgatgaatcctctgatcgaccagtatctgtattatctgaacaggacacaatcaaatagtggaactcttcagcagtctaggctactgtttagccaagctggacccaccagcatgtctcttcaagctaaaaactggctgcctggaccttgctacagacagcagcgtctgtcaaagcaggcaaacgacaacaacaacagcaactttccctggactgcggctacaaagtatcatctaaatggtcgggactcgttggttaatccaggaccagctatggccagccacaaagacgatgaagaaaagtttttccccatgcatggaaccctgatatttggtaaacaaggaacaaatgctaacgacgcggatttggaacatgtcatgattacagatgaagaagaaatcaggaccaccaatcccgtggctacagagcagtacggaaacgtgtcaaataatttgcaaaactcaaatactggtccaactacagaaaatgtcaatcaccagggagcgttacctggtatggtgtggcaggatcgagacgtgtacctgcagggacccatttgggccaagattcctcacaccgacggacactttcacccttctccactgatgggaggttttggactcaaacacccgcctcctcaaatcatgatcaaaaacactcctgttccagccaatcctcctacaaacttcagcgcggcaaagtttgcttccttcatcacacagtattccacgggacaggtcagcgtggagatcgagtgggagctgcagaaggagaacagcaaacgctggaaccccgagatccagtacacttccaactacaacaaatctgttaatgtggactttactgtggacactaatggtgtgtattcagagcctcgccccattggcaccagatacctgactcgtaatctgtaa

SEQ ID NO: 2161 - DNA, 2208 bp, Artificial Sequence
  Synthetic Polynucleotide
atggctgccgatggttatcttccagattggctcgaggacactctctctgaaggaataagacagtggtggaagctcaaacctggcccaccaccaccaaagcccgcagagcggcatcaggacgacagcaggggtcttgtgcttcctgggtacaagtacctcggacccttcaacggactcgacaaaggagagccggtcaacgaggcagacgctgcggccctcgagcacgacaaggcctacgaccggcagctcgacagcggagacaacccgtacctcaagtacaaccacgccgacgcggagtttcaggagcgtcttaaagaagatacgtcttttgggggcaacctcggacgagcagtcttccaggcgaaaaagagggttcttgaacctctgggcctggttgaggaacctgttaagacggctccgggaaaaaagaggccggtagagcactctcctgcggagccagactcctcctcgggaaccggaaaagcgggccagcagcctgcaagaaagagattgaatttcggtcagactggagacgcagactccgtacctgacccccagcctctcggacagccaccagcagcccccacaagtttgggatctactacaatggctacaggcagtggcgcaccaatggcagacaataacgagggtgccgatggagtgggtaattcctcaggaaattggcattgcgattcccaatggctgggcgacagagtcatcaccaccagcacccgaacctgggccctgcccacctacaacaaccacctctacaagcaaatctccagccaatcaggagcatcgaacgacaaccactactttggctacagcaccccttgggggtattttgacttcaacagattccactgtcacttctccccacgtgactggcaaagactcatcaacaacaactggggattccgacccaagagactcaacttcaagctctttaacattcaagtcaaagaggtcacgcagaatgacggtacgacgacgattgccaataaccttaccagcacggttcaggtgtttactgactcggagtaccagctcccgtacgtcctcggctcggcgcatcaaggatgcctcccgccgtttccagcggacgtcttcatggtcccacagtatggatacctcaccctgaacaacgggagtcaggcggtaggacgctcttccttttactgcctggagtactttcctcctcagatgctgcgtaccggaaacaactttaccttcagctacacctttgaggacgtgcctttccacagcagctacgctcacagccagagtttggaccggctgatgaatcctctgatcgaccagtatctgtattatctgaacaggacacaatcaaatagtggaactcttcagcagtctaggctactgtttagccaagctggacccaccagcatgtctcttcaagctaaaaactggctgcctggaccttgctacagacagcagcgtctgtcaaagcaggcaaacgacaacaacaacagcaactttccctggactgcggctacaaagtatcatctaaatggtcgggactcgttggttaatccaggaccagctatggccagccacaaagacgatgaagaaaagtttttccccatgcatggaaccctgatatttggtaaacaaggaacaaatgctaacgacgcggatttggaacatgtcatgattacagatgaagaagaaatcaggaccaccaatcccgtggctacagagcagtacggaaacgtgtcaaataatttgcaaaactcaaatactggtccaactacagaaaatgtcaatcaccagggagcgttacctggtatggtgtggcaggatcgagacgtgtacctgcagggacccatttgggccaagattcctcacaccgacggacactttcacccttctccactgatgggaggttttggactcaaacacccgcctcctcaaatcatgatcaaaaacactcctgttccagccaatcctcctacaaacttcagcgcggcaaagtttgcttccttcatcacacagtattccacgggacaggtcagcgtggagatcgagtgggagctgcagaaggagaacagcaaacgctggaaccccgagatccagtacacttccaactacaacaaatctgttaatgtggactttactgtggacactaatggtgtgtattcagagcctcgccccattggcaccagatacctgactcgtaatctgtaa

SEQ ID NO: 2162 - DNA, 2208 bp, Artificial Sequence
  Synthetic Polynucleotide
atggctgccgatggttatcttccagattggctcgaggacactctccctgaaggaataagacagtggtggaagctcaaacctggcccaccaccaccaaagcccgcagagcggcatcaggacgacagcaggggtcttgtgcttcctgggtacaagtacctcggacccttcaacggactcgacaaaggagagccggtcaacgaggcagacgctgcggccctcgagcacgacaaggcctacgaccggcagctcgacagcggagacaacccgtacctcaagtacaaccacgccgacgcggagtttcaggagcgtcttaaagaagatacgtcttttgggggcaacctcggacgagcagtcttccaggcgaaaaagagggttcttgaacctctgggcctggttgaggaacctgttaagacggctccgggaaaaaagaggccggtagagcactctcctgcggagccagactcctcctcgggaaccggaaaagcgggccagcagcctgcaagaaagagattgaatttcggtcagactggagacgcagactccgtacctgacccccagcctctcggacagccaccagcagcccccacaagtttgggatctactacaatggctacaggcagtggcgcaccaatggcagacaataacgagggtgccgatggagtgggtaattcctcaggaaattggcattgcgattcccaatggctgggcgacagagtcatcaccaccagcacccgaacctgggccctgcccacctacaacaaccacctctacaagcaaatctccagccaatcaggagcatcgaacgacaaccactactttggctacagcaccccttgggggtattttgacttcaacagattccactgtcacttctccccacgtgactggcaaagactcatcaacaacaactggggattccgacccaagagactcaacttcaagctctttaacattcaagtcaaagaggtcacgcagaatgacggtacgacgacgattgccaataaccttaccagcacggttcaggtgtttactgactcggagtaccagctcccgtacgtcctcggctcggcgcatcaaggatgcctcccgccgtttccagcggacgtcttcatggtcccacagtatggatacctcaccctgaacaacgggagtcaggcggtaggacgctcttccttttactgcctggagtactttccttctcagatgctgcgtaccggaaacaactttaccttcagctacacctttgaggacgtgcctttccacagcagctacgctcacagccagagtttggaccggctgatgaatcctctgatcgaccagtatctgtattatctgaacaggacacaatcaaatagtggaactcttcagcagtctaggctactgtttagccaagctggacccaccagcatgtctcttcaagctaaaaactggctgcctggaccttgctacagacagcagcgtctgtcaaagcaggcaaacgacaacaacaacagcaactttccctggactgcggctacaaagtatcatctaaatggtcgggactcgttggttaatccaggaccagctatggccagccacaaagacgatgaagaaaagtttttccccatgcatggaaccctgatatttggtaaacaaggaacaaatgctaacgacgcggatttggaacatgtcatgattacagatgaagaagaaatcaggaccaccaatcccgtggctacagagcagtacggaaacgtgtcaaataatttgcaaaactcaaatactggtccaactacagaaaatgtcaatcaccagggagcgttacctggtatggtgtggcaggatcgagacgtgtacctgcagggacccatttgggccaagattcctcacaccgacggacactttcacccttctccactgatgggaggttttggactcaaacacccgcctcctcaaatcatgatcaaaaacactcctgttccagccaatcctcctacaaacttcagcgcggcaaagtttgcttccttcatcacacagtattccacgggacaggtcagcgtggagatcgagtgggagctgcagaaggagaacagcaaacgctggaaccccgagatccagtacacttccaactacaacaaatctgttaatgtggactttactgtggacactaatggtgtgtattcagagcctcgccccattggcaccagatacctgactcgtaatctgtaa

SEQ ID NO: 2163 - DNA, 2208 bp, Artificial Sequence
  Synthetic Polynucleotide
atggctgccgatggttatcttccagattggctcgaggacactctctctgaaggaataagacagtggtggaagctcaaacctggcccaccaccaccaaagcccgcagagcggcatcaggacgacagcaggggtcttgtgcttcctgggtacaagtacctcggacccttcaacggactcgacaaaggagagccggtcaacgaggcagacgctgcggccctcgagcacgacaaggcctacgaccggcagctcgacagcggagacaacccgtacctcaagtacaaccacgccgacgcggagtttcaggagcgtcttaaagaagatacgtcttttgggggcaacctcggacgagcagtcttccaggcgaaaaagagggttcttgaacctctgggcctggttgaggaacctgttaagacggctccgggaaaaaagaggccggtagagcactctcctgcggagccagactcctcctcgggaaccggaaaagcgggccagcagcctgcaagaaagagattgaatttcggtcagactggagacgcagactccgtacctgacccccagcctctcggacagccaccagcagcccccacaagtttgggatctactacaatggctacaggcagtggcgcaccaatggcagacaataacgagggtgccgatggagtgggtaattcctcaggaaattggcattgcgattcccaatggctgggcgacagagtcatcaccaccagcacccgaacctgggccctgcccacctacaacaaccacctctacaagcaaatctccagccaatcaggagcatcgaacgacaaccactactttggctacagcaccccttgggggtattttgacttcaacagattccactgtcacttctccccacgtgactggcaaagactcatcaacaacaactggggattccgacccaagagactcaacttcaagctctttaacattcaagtcaaagaggtcacgcagaatgacggtacgacgacgattgccaataaccttaccagcacggttcaggtgtttactgactcggagtaccagctcccgtacgtcctcggctcggcgcatcaaggatgcctcccgccgtttccagcggacgtcttcatggtcccacagtatggatacctcaccctgaacaacgggagtcaggcggtaggacgctcttccttttactgcctggagtactttccttctcagatgctgcgtaccggaaacaactttaccttcagctacacctttgaggacgtgcctttccacagcagctacgctcacagccagagtttggaccggctgatgaatcctctgatcgaccagtatctgtattatctgaacaggacacaatcaaatagtggaactcttcagcagtctaggctactgtttagccaagctggacccaccagcatgtctcttcaagctaaaaactggctgcctggaccttgctacagacggcagcgtctgtcaaagcaggcaaacgacaacaacaacagcaactttccctggactgcggctacaaagtatcatctaaatggtcgggactcgttggttaatccaggaccagctatggccagccacaaagacgatgaagaaaagtttttccccatgcatggaaccctgatatttggtaaacaaggaacaaatgctaacgacgcggatttggaacatgtcatgattacagatgaagaagaaatcaggaccaccaatcccgtggctacagagcagtacggaaacgtgtcaaataatttgcaaaactcaaatactggtccaactacagaaaatgtcaatcaccagggagcgttacctggtatggtgtggcaggatcgagacgtgtacctgcagggacccatttgggccaagattcctcacaccgacggacactttcacccttctccactgatgggaggttttggactcaaacacccgcctcctcaaatcatgatcaaaaacactcctgttccagccaatcctcctacaaacttcagcgcggcaaagtttgcttccttcatcacacagtattccacgggacaggtcagcgtggagatcgagtgggagctgcagaaggagaacagcaaacgctggaaccccgagatccagtacacttccaactacaacaaatctgttaatgtggactttactgtggacactaatggtgtgtattcagagcctcgccccattggcaccagatacctgactcgtaatctgtaa

SEQ ID NO: 2164 - DNA, 2208 bp, Artificial Sequence
  Synthetic Polynucleotide
atggctgccgatggttatcttccagattggctcgaggacactctctctgaaggaataagacagtggtggaagctcaaacctggcccaccaccaccaaagcccgcagagcggcatcaggacgacagcaggggtcttgtgcttcctgggtacaagtacctcggacccttcaacggactcgacaaaggagagccggtcaacgaggcagacgctgcggccctcgagcacgacaaggcctacgaccggcagctcgacagcggagacaacccgtacctcaagtacaaccacgccgacgcggagtttcaggagcgtcttaaagaagatacgtcttttgggggcaacctcggacgagcagtcttccaggcgaaaaagagggttcttgaacctctgggcctggttgaggaacctgttaagacggctccgggaaaaaagaggccggtagagcactctcctgcggagccagactcctcctcgggaaccggaaaagcgggccagcagcctgcaagaaagagattgaatttcggtcagactggagacgcagactccgtacctgacccccagcctctcggacagccaccagcagcccccacaagtttgggatctactacaatggctacaggcagtggcgcaccaatggcagacaataacgagggtgccgatggagtgggtaattcctcaggaaattggcattgcgattcccaatggctgggcgacagagtcatcaccaccagcacccgaacctgggccctgcccacctacaacaaccacctctacaagcaaatctccagccaatcaggagcatcgaacgacaaccactactttggctacagcaccccttgggggtattttgacttcaacagattccactgtcacttctccccacgtgactggcaaagactcatcaacaacaactggggattccgacccaagagactcaacttcaagctctttaacattcaagtcaaagaggtcacgcagaatgacggtacgacgacgattgccaataaccttaccagcacggttcaggtgtttactgactcggagtaccagctcccgtacgtcctcggctcggcgcatcaaggatgcctcccgccgtttccagcggacgtcttcatggtcccacagtatggatacctcaccctgaacaacgggagtcaggcggtaggacgctcttccttttactgcctggagtaccttccttctcagatgctgcgtaccggaaacaactttaccttcagctacacctttgaggacgtgcctttccacagcagctacgctcacagccagagtttggaccggctgatgaatcctctgatcgaccagtatctgtattatctgaacaggacacaatcaaatagtggaactcttcagcagtctaggctactgtttagccaagctggacccaccagcatgtctcttcaagctaaaaactggctgcctggaccttgctacagacagcagcgtctgtcaaagcaggcaaacgacaacaacaacagcaactttccctggactgcggctacaaagtatcatctaaatggtcgggactcgttggttaatccaggaccagctatggccagccacaaagacgatgaagaaaagtttttccccatgcatggaaccctgatatttggtaaacaaggaacaaatgctaacgacgcggatttggaacatgtcatgattacagatgaagaagaaatcaggaccaccaatcccgtggctacagagcagtacggaaacgtgtcaaataatttgcaaaactcaaatactggtccaactacagaaaatgtcaatcaccagggagcgttacctggtatggtgtggcaggatcgagacgtgtacctgcagggacccatttgggccaagattcctcacaccgacggacactttcacccttctccactgatgggaggttttggactcaaacacccgcctcctcaaatcatgatcaaaaacactcctgttccagccaatcctcctacaaacttcagcgcggcaaagtttgcttccttcatcacacagtattccacgggacaggtcagcgtggagatcgagtgggagctgcagaaggagaacagcaaacgctggaaccccgagatccagtacacttccaactacaacaaatctgttaatgtggactttactgtggacactaatggtgtgtattcagagcctcgccccattggcaccagatacctgactcgtaatctgtaa

SEQ ID NO: 2165 - DNA, 2208 bp, Artificial Sequence
  Synthetic Polynucleotide
atggctgccgatggttatcttccagattggctcgaggacactctctctgaaggaataagacagtggtggaagctcaaacctggcccaccaccaccaaagcccgcagagcggcatcaggacgacagcaggggtcttgtgcttcctgggtacaagtacctcggacccttcaacggactcgacaaaggagagccggtcaacgaggcagacgctgcggccctcgagcacgacaaggcctacgaccggcagctcgacagcggagacaacccgtacctcaagtacaaccacgccgacgcggagtttcaggagcgtcttaaagaagatacgtcttttgggggcaacctcggacgagcagtcttccaggcgaaaaagagggttcttgaacctctgggcctggttgaggaacctgttaagacggctccgggaaaaaagaggccggtagagcactctcctgcggagccagactcctcctcgggaaccggaaaagcgggccagcagcctgcaagaaagagattgaatttcggtcagactggagacgcagactccgtacctgacccccagcctctcggacagccaccagcagcccccacaagtttgggatctactacaatggctacaggcagtggcgcaccaatggcagacaataacgagggtgccgatggagtgggtaattcctcaggaaattggcattgcgattcccaatggctgggcgacagagtcatcaccaccagcacccgaacctgggccctgcccacctacaacaaccacctctacaagcaaatctccagccaatcaggagcatcgaacgacaaccactactttggctacagcaccccttgggggtattttgacttcaacagattccactgtcacttctccccacgtgactggcaaagactcatcaacaacaactggggattccgacccaagagactcaacttcaagctctttaacattcaagtcaaagaggtcacgcagaatgacggtacgacgacgattgccaataaccttaccagcacggttcaggtgtttactgactcggagtaccagctcccgtacgtcctcggctcggcgcatcaaggatgcctcccgccgtttccagcggacgtcttcatggtcccacagtatggatacctcaccctgaacaacgggagtcaggcggtaggacgctcttccttttactgcctggagtactttccttctcagatgctgcgtaccggaaacaactttaccttcagctacacctttgaggacgtgcctttccacagcagctacgctcacagccagagtttggaccggctgatgaatcctctgatcgaccagtatctgtattatctgaacaggacacaatcaaatagtggaactcttcagcagtctaggctactgtttagccaagctggacccaccagcatgtctcttcaagctaaaaactggctgcctggaccttgctacagacagcagcgtctgtcaaagcaggcaaacgacaacaacaacggcaactttccctggactgcggctacaaagtatcatctaaatggtcgggactcgttggttaatccaggaccagctatggccagccacaaagacgatgaagaaaagtttttccccatgcatggaaccctgatatttggtaaacaaggaacaaatgctaacgacgcggatttggaacatgtcatgattacagatgaagaagaaatcaggaccaccaatcccgtggctacagagcagtacggaaacgtgtcaaataatttgcaaaactcaaatactggtccaactacagaaaatgtcaatcaccagggagcgttacctggtatggtgtggcaggatcgagacgtgtacctgcagggacccatttgggccaagattcctcacaccgacggacactttcacccttctccactgatgggaggttttggactcaaacacccgcctcctcaaatcatgatcaaaaacactcctgttccagccaatcctcctacaaacttcagcgcggcaaagtttgcttccttcatcacacagtattccacgggacaggtcagcgtggagatcgagtgggagctgcagaaggagaacagcaaacgctggaaccccgagatccagtacacttccaactacaacaaatctgttaatgtggactttactgtggacactaatggtgtgtattcagagcctcgccccattggcaccagatacctgactcgtaatctgtaa

SEQ ID NO: 2166 - DNA, 2208 bp, Artificial Sequence
  Synthetic Polynucleotide
atggctgccgatggttatcttccagattggctcgaggacactctctctgaaggaataagacagtggtggaagctcaaacctggcccaccaccaccaaagcccgcagagcggcatcaggacgacagcaggggtcttgtgcttcctgggtacaagtacctcggacccttcaacggactcgacaaaggagagccggtcaacgaggcagacgctgcggccctcgagcacgacaaggcctacgaccggcagttcgacagcggagacaacccgtacctcaagtacaaccacgccgacgcggagtttcaggagcgtcttaaagaagatacgtcttttgggggcaacctcggacgagcagtcttccaggcgaaaaagagggttcttgaacctctgggcctggttgaggaacctgttaagacggctccgggaaaaaagaggccggtagagcactctcctgcggagccagactcctcctcgggaaccggaaaagcgggccagcagcctgcaagaaagagattgaatttcggtcagactggagacgcagactccgtacctgacccccagcctctcggacagccaccagcagcccccacaagtttgggatctactacaatggctacaggcagtggcgcaccaatggcagacaataacgagggtgccgatggagtgggtaattcctcaggaaattggcattgcgattcccaatggctgggcgacagagtcatcaccaccagcacccgaacctgggccctgcccacctacaacaaccacctctacaagcaaatctccagccaatcaggagcatcgaacgacaaccactactttggctacagcaccccttgggggtattttgacttcaacagattccactgtcacttctccccacgtgactggcaaagactcatcaacaacaactggggattccgacccaagagactcaacttcaagctctttaacattcaagtcaaagaggtcacgcagaatgacggtacgacgacgattgccaataaccttaccagcacggttcaggtgtttactgactcggagtaccagctcccgtacgtcctcggctcggcgcatcaaggatgcctcccgccgtttccagcggacgtcttcatggtcccacagtatggatacctcaccctgaacaacgggagtcaggcggtaggacgctcttccttttactgcctggagtactttccttctcagatgctgcgtaccggaaacaactttaccttcagctacacctttgaggacgtgcctttccacagcagctacgctcacagccagagtttggaccggctgatgaatcctctgatcgaccagtatctgtattatctgaacaggacacaatcaaatagtggaactcttcagcagtctaggctactgtttagccaagctggacccaccagcatgtctcttcaagctaaaaactggctgcctggaccttgctacagacagcagcgtctgtcaaagcaggcaaacgacaacaacaacagcaactttccctggactgcggctacaaagtatcatctaaatggtcgggactcgttggttaatccaggaccagctatggccagccacaaagacgatgaagaaaagtttttccccatgcatggaaccctgatatttggtaaacaaggaacaaatgctaacgacgcggatttggaacatgtcatgattacagatgaagaagaaatcaggaccaccaatcccgtggctacagagcagtacggaaacgtgtcaaataatttgcaaaactcaaatactggtccaactacagaaaatgtcaatcaccagggagcgttacctggtatggtgtggcaggatcgagacgtgtacctgcagggacccatttgggccaagattcctcacaccgacggacactttcacccttctccactgatgggaggttttggactcaaacacccgcctcctcaaatcatgatcaaaaacactcctgttccagccaatcctcctacaaacttcagcgcggcaaagtttgcttccttcatcacacagtattccacgggacaggtcagcgtggagatcgagtgggagctgcagaaggagaacagcaaacgctggaaccccgagatccagtacacttccaactacaacaaatctgttaatgtggactttactgtggacactaatggtgtgtattcagagcctcgccccattggcaccagatacctgactcgtaatctgtaa

SEQ ID NO: 2167 - DNA, 2208 bp, Artificial Sequence
  Synthetic Polynucleotide
atggctgccgatggttatcttccagattggctcgaggacactctctctgaaggaataagacagtggtggaagctcaaacctggcccaccaccaccaaagcccgcagagcggcatcaggacgacagcaggggtcttgtgcttcctgggtacaagtacctcggacccttcaacggactcgacaaaggagagccggtcaacgaggcagacgctgcggccctcgagcacgacaaggcctacgaccggcagctcgacagcggagacaacccgtacctcaagtacaaccacgccgacgcggagtttcaggagcgtcttaaagaagatacgtcttttgggggcaacctcggacgagcagtcttccaggcgaaaaagagggttcttgaacctctgggcctggttgaggaacctgttaagacggctccgggaaaaaagaggccggtagagcactctcctgcggagccagactcctcctcgggaaccggaaaagcgggccagcagcctgcaagaaagagattgaatttcggtcagactggagacgcagactccgtacctgacccccagcctctcggacagccaccagcagcccccacaagtttgggatctactacaatggctacaggcagtggcgcaccaatggcagacaataacgagggtgccgatggagtgggtaattcctcaggaaattggcattgcgattcccaatggctgggcgacagagtcatcaccaccagcacccgaacctgggccctgcccacctacaacaaccacctctacaagcaaatctccagccaatcaggagcatcgaacgacaaccactactttggctacagcaccccttgggggtattttgacttcaacagattccactgtcacttctccccacgtgaccggcaaagactcatcaacaacaactggggattccgacccaagagactcaacttcaagctctttaacattcaagtcaaagaggtcacgcagaatgacggtacgacgacgattgccaataaccttaccagcacggttcaggtgtttactgactcggagtaccagctcccgtacgtcctcggctcggcgcatcaaggatgcctcccgccgtttccagcggacgtcttcatggtcccacagtatggatacctcaccctgaacaacgggagtcaggcggtaggacgctcttccttttactgcctggagtactttccttctcagatgctgcgtaccggaaacaactttaccttcagctacacctttgaggacgtgcctttccacagcagctacgctcacagccagagtttggaccggctgatgaatcctctgatcgaccagtatctgtattatctgaacaggacacaatcaaatagtggaactcttcagcagtctaggctactgtttagccaagctggacccaccagcatgtctcttcaagctaaaaactggctgcctggaccttgctacagacagcagcgtctgtcaaagcaggcaaacgacaacaacaacagcaactttccctggactgcggctacaaagtatcatctaaatggtcgggactcgttggttaatccaggaccagctatggccagccacaaagacgatgaagaaaagtttttccccatgcatggaaccctgatatttggtaaacaaggaacaaatgctaacgacgcggatttggaacatgtcatgattacagatgaagaagaaatcaggaccaccaatcccgtggctacagagcagtacggaaacgtgtcaaataatttgcaaaactcaaatactggtccaactacagaaaatgtcaatcaccagggagcgttacctggtatggtgtggcaggatcgagacgtgtacctgcagggacccatttgggccaagattcctcacaccgacggacactttcacccttctccactgatgggaggttttggactcaaacacccgcctcctcaaatcatgatcaaaaacactcctgttccagccaatcctcctacaaacttcagcgcggcaaagtttgcttccttcatcacacagtattccacgggacaggtcagcgtggagatcgagtgggagctgcagaaggagaacagcaaacgctggaaccccgagatccagtacacttccaactacaacaaatctgttaatgtggactttactgtggacactaatggtgtgtattcagagcctcgccccattggcaccagatacctgactcgtaatctgtaa

SEQ ID NO: 2168 - DNA, 2208 bp, Artificial Sequence
  Synthetic Polynucleotide
atggctgccgatggttatcttccagattggctcgaggacactctctctgaaggaataagacagtggtggaagctcaaacctggcccaccaccaccaaagcccgcagagcggcatcaggacgacagcaggggtcttgtgcttcctgggtacaagtacctcggacccttcaacggactcgacaaaggagagccggtcaacgaggcagacgctgcggccctcgagcacgacaaggcctacgaccggcagctcgacagcggagacaacccgtacctcaagtacaaccacgccgacgcggagtttcaggagcgtcttaaagaagatacgtcttttgggggcaacctcggacgagcagtcttccaggcgaaaaagagggttcttgaacctctgggcctggttgaggaacctgttaagacggctccgggaaaaaagaggccggtagagcactctcctgcggagccagactcctcctcgggaaccggaaaagcgggccagcagcctgcaagaaagagattgaatttcggtcagactggagacgcagactccgtacctgacccccagcctctcggacagccaccagcagcccccacaagtttgggatctactacaatggctacaggcagtggcgcaccaatggcagacaataacgagggtgccgatggagtgggtaattcctcaggaaattggcattgcgattcccaatggctgggcgacagagtcatcaccaccagcacccgaacctgggccctgcccgcctacaacaaccacctctacaagcaaatctccagccaatcaggagcatcgaacgacaaccactactttggctacagcaccccttgggggtattttgacttcaacagattccactgtcacttctccccacgtgactggcaaagactcatcaacaacaactggggattccgacccaagagactcaacttcaagctctttaacattcaagtcaaagaggtcacgcagaatgacggtacgacgacgattgccaataaccttaccagcacggttcaggtgtttactgactcggagtaccagctcccgtacgtcctcggctcggcgcatcaaggatgcctcccgccgtttccagcggacgtcttcatggtcccacagtatggatacctcaccctgaacaacgggagtcaggcggtaggacgctcttccttttactgcctggagtactttccttctcagatgctgcgtaccggaaacaactttaccttcagctacacctttgaggacgtgcctttccacagcagctacgctcacagccagagtttggaccggctgatgaatcctctgatcgaccagtatctgtattatctgaacaggacacaatcaaatagtggaactcttcagcagtctaggctactgtttagccaagctggacccaccagcatgtctcttcaagctaaaaactggctgcctggaccttgctacagacagcagcgtctgtcaaagcaggcaaacgacaacaacaacagcaactttccctggactgcggctacaaagtatcatctaaatggtcgggactcgttggttaatccaggaccagctatggccagccacaaagacgatgaagaaaagtttttccccatgcatggaaccctgatatttggtaaacaaggaacaaatgctaacgacgcggatttggaacatgtcatgattacagatgaagaagaaatcaggaccaccaatcccgtggctacagagcagtacggaaacgtgtcaaataatttgcaaaactcaaatactggtccaactacagaaaatgtcaatcaccagggagcgttacctggtatggtgtggcaggatcgagacgtgtacctgcagggacccatttgggccaagattcctcacaccgacggacactttcacccttctccactgatgggaggttttggactcaaacacccgcctcctcaaatcatgatcaaaaacactcctgttccagccaatcctcctacaaacttcagcgcggcaaagtttgcttccttcatcacacagtattccacgggacaggtcagcgtggagatcgagtgggagctgcagaaggagaacagcaaacgctggaaccccgagatccagtacacttccaactacaacaaatctgttaatgtggactttactgtggacactaatggtgtgtattcagagcctcgccccattggcaccagatacctgactcgtaatctgtaa

SEQ ID NO: 2169 - DNA, 2205 bp, Artificial Sequence
  Synthetic Polynucleotide
atggctgccgatggttatcttccagattggctcgaggacactctctctgaaggaataagacagtggtggaagctcaaacctggcccaccaccaccaaagcccgcagagcggcatcaggacgacagcaggggtcttgtgcttcctgggtacaagtacctcggacccttcaacggactcgacaaaggagagccggtcaacgaggcagacgctgcggccctcgagcacgacaaggcctacgaccggcagctcgacagcggagacaacccgtacctcaagtacaaccacgccgacgcggagtttcaggagcgtcttaaagaagatacgtcttttgggggcaacctcggacgagcagtcttccaggcgaaaaagagggttcttgaacctctgggcctggttgaggaacctgttaagacggctccgggaaaaaagaggccggtagagcactctcctgcggagccagactcctcctcgggaaccggaaaagcgggccagcagcctgcaagaaagagattgaatttcggtcagactggagacgcagactccgtacctgacccccagcctctcggacagccaccagcagcccccacaagtttgggatctactacaatggctacaggcagtggcgcaccaatggcagacaataacgagggtgccgatggagtgggtaattcctcaggaaattggcattgcgattcccaatggctgggcgacagagtcatcaccaccagcacccgaacctgggccctgcccacctacaacaaccacctctacaagcaaatctccagccaatcaggagcatcgaacgacaaccactactttggctacagcaccccttgggggtattttgacttcaacagattccactgtcacttctccccacgtgactggcaaagactcatcaacaacaactggggattccgacccaagagactcaacttcaagctctttaacattcaagtcaaagaggtcacgcagaatgacggtacgacgacgattgccaataaccttaccagcacggttcaggtgtttactgactcggagtaccagctcccgtacgtcctcggctcggcgcatcaaggatgcctcccgccgtttccagcggacgccttcatggtcccacagtatggatacctcaccctgaacaacgggagtcaggcggtaggacgctcttccttttactgcctggagtactttccttctcagatgctgcgtaccggaaacaactttaccttcagctacacctttgaggacgtgcctttccacagcagctacgctcacagccagagtttggaccggctgatgaatcctctgatcgaccagtatctgtattatctgaacaggacacaatcaaatagtggaactcttcagcagtctaggctactgtttagccaagctggacccaccagcatgtctcttcaagctaaaaactggctgcctggaccttgctacagacagcagcgtctgtcaaagcaggcaaacgacaacaacagcaactttccctggactgcggctacaaagtatcatctaaatggtcgggactcgttggttaatccaggaccagctatggccagccacaaagacgatgaagaaaagtttttccccatgcatggaaccctgatatttggtaaacaaggaacaaatgctaacgacgcggatttggaacatgtcatgattacagatgaagaagaaatcaggaccaccaatcccgtggctacagagcagtacggaaacgtgtcaaataatttgcaaaactcaaatactggtccaactacagaaaatgtcaatcaccagggagcgttacctggtatggtgtggcaggatcgagacgtgtacctgcagggacccatttgggccaagattcctcacaccgacggacactttcacccttctccactgatgggaggttttggactcaaacacccgcctcctcaaatcatgatcaaaaacactcctgttccagccaatcctcctacaaacttcagcgcggcaaagtttgcttccttcatcacacagtattccacgggacaggtcagcgtggagatcgagtgggagctgcagaaggagaacagcaaacgctggaaccccgagatccagtacacttccaactacaacaaatctgttaatgtggactttactgtggacactaatggtgtgtattcagagcctcgccccattggcaccagatacctgactcgtaatctgtaa

SEQ ID NO: 2170 - DNA, 2208 bp, Artificial Sequence
  Synthetic Polynucleotide
atggctgccgatggttatcttccagattggctcgaggacactctctctgaaggaataagacagtggtggaagctcaaacctggcccaccaccaccaaagcccgcagagcggcatcaggacgacagcaggggtcttgtgcttcctgggtacaagtacctcggacccttcaacggactcgacaaaggagagccggtcaacgaggcagacgctgcggccctcgagcacgacaaggcctacgaccggcagctcgacagcggagacaacccgtacctcaagtacaaccacgccgacgcggagtttcaggagcgtcttaaagaagatacgtcttttgggggcaacctcggacgagcagtcttccaggcgaaaaagagggttcttgaacctctgggcctggttgaggaacctgttaagacggctccgggaaaaaagaggccggtagagcactctcctgcggagccagactcctcctcgggaaccggaaaagcgggccagcagcctgcaagaaagagattgaatttcggtcagactggagacgcagactccgtacctgacccccagcctctcggacagccaccagcagcccccacaagtttgggatctactacaatggctacaggcagtggcgcaccaatggcagacaataacgagggtgccgatggagtgggtaattcctcaggaaattggcattgcgattcccaatggctgggcgacagagtcatcaccaccagcacccgaacctgggccctgcccacctacaacaaccacctctacaagcaaatctccagccaatcaggagcatcgaacgacaaccactactttggctacagcaccccttgggggtattttgacttcaacagattccactgtcacttctccccacgtggctggcaaagactcatcaacaacaactggggattccgacccaagagactcaacttcaagctctttaacattcaagtcaaagaggtcacgcagaatgacggtacgacgacgattgccaataaccttaccagcacggttcaggtgtttactgactcggagtaccagctcccgtacgtcctcggctcggcgcatcaaggatgcctcccgccgtttccagcggacgtcttcatggtcccacagtatggatacctcaccctgaacaacgggagtcaggcggtaggacgctcttccttttactgcctggagtactttccttctcagatgctgcgtaccggaaacaactttaccttcagctacacctttgaggacgtgcctttccacagcagctacgctcacagccagagtttggaccggctgatgaatcctctgatcgaccagtatctgtattatctgaacaggacacaatcaaatagtggaactcttcagcagtctaggctactgtttagccaagctggacccaccagcatgtctcttcaagctaaaaactggctgcctggaccttgctacagacagcagcgtctgtcaaagcaggcaaacgacaacaacaacagcaactttccctggactgcggctacaaagtatcatctaaatggtcgggactcgttggttaatccaggaccagctatggccagccacaaagacgatgaagaaaagtttttccccatgcatggaaccctgatatttggtaaacaaggaacaaatgctaacgacgcggatttggaacatgtcatgattacagatgaagaagaaatcaggaccaccaatcccgtggctacagagcagtacggaaacgtgtcaaataatttgcaaaactcaaatactggtccaactacagaaaatgtcaatcaccagggagcgttacctggtatggtgtggcaggatcgagacgtgtacctgcagggacccatttgggccaagattcctcacaccgacggacactttcacccttctccactgatgggaggttttggactcaaacacccgcctcctcaaatcatgatcaaaaacactcctgttccagccaatcctcctacaaacttcagcgcggcaaagtttgcttccttcatcacacagtattccacgggacaggtcagcgtggagatcgagtgggagctgcagaaggagaacagcaaacgctggaaccccgagatccagtacacttccaactacaacaaatctgttaatgtggactttactgtggacactaatggtgtgtattcagagcctcgccccattggcaccagatacctgactcgtaatctgtaa

SEQ ID NO: 2171 - DNA, 2208 bp, Artificial Sequence
  Synthetic Polynucleotide
atggctgccgatggttatcttccagattggctcgaggacactctctctgaaggaataagacagtggtggaagctcaaacctggcccaccaccaccaaagcccgcagagcggcatcaggacgacagcaggggtcttgtgcttcctgggtacaagtacctcggacccttcaacggactcgacaaaggagagccggtcaacgaggcagacgctgcggccctcgagcacgacaaggcctacgaccggcagctcgacagcggagacaacccgtacctcaagtacaaccacgccgacgcggagtttcaggagcgtcttaaagaagatacgtcttttgggggcaacctcggacgagcagtcttccaggcgaaaaagagggttcttgaacctctgggcctggttgaggaacctgttaagacggctccgggaaaaaagaggccggtagagcactctcctgcggagccagactcctcctcgggaaccggaaaagcgggccagcagcctgcaagaaagagattgaatttcggtcagactggagacgcagactccgtacctgacccccagcctctcggacagccaccagcagcccccacaagtttgggatctactacaatggctacaggcagtggcgcaccaatggcagacaataacgagggtgccgatggagtgggtaattcctcaggaaattggcattgcgattcccaatggctgggcgacagagtcatcaccaccagcacccgaacctgggccctgcccacctacaacaaccacctctacaagcaaatctccagccaatcaggagcatcgaacgacaaccactactttggctacagcaccccttgggggtattttgacttcaacagattccactgtcacttctccccacgtgactggcaaagactcatcaacaacaactggggattccgacccaagagactcaacttcaagctctttaacattcaagtcaaagaggtcacgcagaatgacggtacgacgacgattgccaataaccttaccagcacggttcaggtgtttactgactcggagtaccagctcccgtacgtcctcggctcggcgcatcaaggatgcctcccgccgtttccagcggacgtcttcatggtcccacagtatggatacctcaccctgaacaacgggagtcaggcggtaggacgctcttccttttactgcctggagtactttccttctcagatgctgcgtaccggaaacaactttaccttcagctacacctttgaggacgtgcctttccacagcagctacgctcacagccagagtttggaccggctgatgaatcctctgatcgaccagtatctgtattatctgaacgggacacaatcaaatagtggaactcttcagcagtctaggctactgtttagccaagctggacccaccagcatgtctcttcaagctaaaaactggctgcctggaccttgctacagacagcagcgtctgtcaaagcaggcaaacgacaacaacaacagcaactttccctggactgcggctacaaagtatcatctaaatggtcgggactcgttggttaatccaggaccagctatggccagccacaaagacgatgaagaaaagtttttccccatgcatggaaccctgatatttggtaaacaaggaacaaatgctaacgacgcggatttggaacatgtcatgattacagatgaagaagaaatcaggaccaccaatcccgtggctacagagcagtacggaaacgtgtcaaataatttgcaaaactcaaatactggtccaactacagaaaatgtcaatcaccagggagcgttacctggtatggtgtggcaggatcgagacgtgtacctgcagggacccatttgggccaagattcctcacaccgacggacactttcacccttctccactgatgggaggttttggactcaaacacccgcctcctcaaatcatgatcaaaaacactcctgttccagccaatcctcctacaaacttcagcgcggcaaagtttgcttccttcatcacacagtattccacgggacaggtcagcgtggagatcgagtgggagctgcagaaggagaacagcaaacgctggaaccccgagatccagtacacttccaactacaacaaatctgttaatgtggactttactgtggacactaatggtgtgtattcagagcctcgccccattggcaccagatacctgactcgtaatctgtaa

SEQ ID NO: 2172 - DNA, 2208 bp, Artificial Sequence
  Synthetic Polynucleotide
atggctgccgatggttatcttccagattggctcgaggacactctctctgaaggaataagacagtggtggaagctcaaacctggcccaccaccaccaaagcccgcagagcggcatcaggacgacagcaggggtcttgtgcttcctgggtacaagtacctcggacccttcaacggactcgacaaaggagagccggtcaacgaggcagacgctgcggccctcgagcacgacaaggcctacgaccggcagctcgacagcggagacaacccgtacctcaagtacaaccacgccgacgcggagtttcaggagcgtcttaaagaagatacgtcttttgggggcaacctcggacgagcagtcttccaggcgaaaaagagggttcttgaacctctgggcctggttgaggaacctgttaagacggctccgggaaaaaagaggccggtagagcactctcctgcggagccagactcctcctcgggaaccggaaaagcgggccagcagcctgcaagaaagagattgaatttcggtcagactggagacgcagactccgtacctgacccccagcctctcggacagccaccagcagcccccacaagtttgggatctactacaatggctacaggcagtggcgcaccaatggcagacaataacgagggtgccgatggagtgggtaattcctcaggaaattggcattgcgattcccaatggctgggcgacagagtcatcaccaccagcacccgaacctgggccctgcccacctacaacaaccacctctacaagcaaatctccagccaatcaggagcatcgaacgacaaccactactttggctacagcaccccttgggggtattttgacttcaacagattccactgtcacctctccccacgtgactggcaaagactcatcaacaacaactggggattccgacccaagagactcaacttcaagctctttaacattcaagtcaaagaggtcacgcagaatgacggtacgacgacgattgccaataaccttaccagcacggttcaggtgtttactgactcggagtaccagctcccgtacgtcctcggctcggcgcatcaaggatgcctcccgccgtttccagcggacgtcttcatggtcccacagtatggatacctcaccctgaacaacgggagtcaggcggtaggacgctcttccttttactgcctggagtactttccttctcagatgctgcgtaccggaaacaactttaccttcagctacacctttgaggacgtgcctttccacagcagctacgctcacagccagagtttggaccggctgatgaatcctctgatcgaccagtatctgtattatctgaacaggacacaatcaaatagtggaactcttcagcagtctaggctactgtttagccaagctggacccaccagcatgtctcttcaagctaaaaactggctgcctggaccttgctacagacagcagcgtctgtcaaagcaggcaaacgacaacaacaacagcaactttccctggactgcggctacaaagtatcatctaaatggtcgggactcgttggttaatccaggaccagctatggccagccacaaagacgatgaagaaaagtttttccccatgcatggaaccctgatatttggtaaacaaggaacaaatgctaacgacgcggatttggaacatgtcatgattacagatgaagaagaaatcaggaccaccaatcccgtggctacagagcagtacggaaacgtgtcaaataatttgcaaaactcaaatactggtccaactacagaaaatgtcaatcaccagggagcgttacctggtatggtgtggcaggatcgagacgtgtacctgcagggacccatttgggccaagattcctcacaccgacggacactttcacccttctccactgatgggaggttttggactcaaacacccgcctcctcaaatcatgatcaaaaacactcctgttccagccaatcctcctacaaacttcagcgcggcaaagtttgcttccttcatcacacagtattccacgggacaggtcagcgtggagatcgagtgggagctgcagaaggagaacagcaaacgctggaaccccgagatccagtacacttccaactacaacaaatctgttaatgtggactttactgtggacactaatggtgtgtattcagagcctcgccccattggcaccagatacctgactcgtaatctgtaa

SEQ ID NO: 2173 - DNA, 2208 bp, Artificial Sequence
  Synthetic Polynucleotide
atggctgccgatggttatcttccagattggctcgaggacactctctctgaaggaataagacagtggtggaagctcaaacctggcccaccaccaccaaagcccgcagagcggcatcaggacgacagcaggggtcttgtgcttcctgggtacaagtacctcggacccttcaacggactcgacaaaggagagccggtcaacgaggcagacgctgcggccctcgggcacgacaaggcctacgaccggcagctcgacagcggagacaacccgtacctcaagtacaaccacgccgacgcggagtttcaggagcgtcttaaagaagatacgtcttttgggggcaacctcggacgagcagtcttccaggcgaaaaagagggttcttgaacctctgggcctggttgaggaacctgttaagacggctccgggaaaaaagaggccggtagagcactctcctgcggagccagactcctcctcgggaaccggaaaagcgggccagcagcctgcaagaaagagattgaatttcggtcagactggagacgcagactccgtacctgacccccagcctctcggacagccaccagcagcccccacaagtttgggatctactacaatggctacaggcagtggcgcaccaatggcagacaataacgagggtgccgatggagtgggtaattcctcaggaaattggcattgcgattcccaatggctgggcgacagagtcatcaccaccagcacccgaacctgggccctgcccacctacaacaaccacctctacaagcaaatctccagccaatcaggagcatcgaacgacgaccactactttggctacagcaccccttgggggtattttgacttcaacagattccactgtcacttctccccacgtgactggcaaagactcatcaacaacaactggggattccgacccaagagactcaacttcaagctctttaacattcaagtcaaagaggtcacgcagaatgacggtacgacgacgattgccaataaccttaccagcacggttcaggtgtttactgactcggagtaccagctcccgtacgtcctcggctcggcgcatcaaggatgcctcccgccgtttccagcggacgtcttcatggtcccacagtatggatacctcaccctgaacaacgggagtcaggcggtaggacgctcttccttttactgcctggagtactttccttctcagatgctgcgtaccggaaacaactttaccttcagctacacctttgaggacgtgcctttccacagcagctacgctcacagccagagtttggaccggctgatgaatcctctgatcgaccagtatctgtattatctgaacaggacacaatcaaatagtggaactcttcagcagtctaggctactgtttagccaagctggacccaccagcatgtctcttcaagctaaaaactggctgcctggaccttgctacagacagcagcgtctgtcaaagcaggcaaacgacaacaacaacagcaactttccctggactgcggctacaaagtatcatctaaatggtcgggactcgttggttaatccaggaccagctatggccagccacaaagacgatgaagaaaagtttttccccatgcatggaaccctgatatttggtaaacaaggaacaaatgctaacgacgcggatttggaacatgtcatgattacagatgaagaagaaatcaggaccaccaatcccgtggctacagagcagtacggaaacgtgtcaaataatttgcaaaactcaaatactggtccaactacagaaaatgtcaatcaccagggagcgttacctggtatggtgtggcaggatcgagacgtgtacctgcagggacccatttgggccaagattcctcacaccgacggacactttcacccttctccactgatgggaggttttggactcaaacacccgcctcctcaaatcatgatcaaaaacactcctgttccagccaatcctcctacaaacttcagcgcggcaaagtttgcttccttcatcacacagtattccacgggacaggtcagcgtggagatcgagtgggagctgcagaaggagaacagcaaacgctggaaccccgagatccagtacacttccaactacaacaaatctgttaatgtggactttactgtggacactaatggtgtgtattcagagcctcgccccattggcaccagatacctgactcgtaatctgtaa

SEQ ID NO: 2174 - DNA, 2208 bp, Artificial Sequence
  Synthetic Polynucleotide
atggctgccgatggttatcttccagattggctcgaggacactctctctgaaggaataagacagtggtggaagctcaaacctggcccaccaccaccaaagcccgcagagcggcatcaggacgacagcaggggtcttgtgcttcctgggtacaagtacctcggacccttcaacggactcgacaaaggagagccggtcaacgaggcagacgctgcggccctcgagcacgacaaggcctacgaccggcagctcgacagcggagacaacccgtacctcaagtacaaccacgccgacgcggagtttcaggagcgtcttaaagaagatacgtcttttgggggcaacctcggacgagcagtcttccaggcgaaaaagagggttcttgaacctctgggcctggttgaggaacctgttaagacggctccgggaaaaaagaggccggtagagcactctcctgcggagccagactcctcctcgggaaccggaaaagcgggccagcagcctgcaagaaagagattgaatttcggtcagactggagacgcagactccgtacctgacccccagcctctcggacagccaccagcagcccccacaagtttgggatctactacaatggctacaggcagtggcgcaccaatggcagacaataacgagggtgccgatggagtgggtaattcctcaggaaattggcattgcgattcccaatggctgggcgacagagtcatcaccaccagcacccgaacctgggccctgcccacctacaacaaccacctctacaagcaaatctccagccaatcaggagcatcgaacgacaaccactactttggctacagcaccccttgggggtattttgacttcaacagattccactgtcacttctccccacgtgactggcaaagactcatcaacaacaactggggattccgacccaagagactcaacttcaagctctttaacattcaagtcaaagaggtcacgcagaatgacggtacgacgacgattgccaataaccttaccagcacggttcaggtgtttactgactcggagtaccagctcccgtacgtcctcggctcggcgcatcaaggatgcctcccgccgtttccagcggacgtcttcatggtcccacagtatggatacctcaccctgaacaacgggagtcaggcggtaggacgctcttccttttactgcctggagtactttccttctcagatgctgcgtaccggaaacaactttaccttcagctacacctttgaggacgtgcctttccacagcagctacgctcacagccagagtttggaccggctgatgaatcctctgatcgaccagtatctgtattatctgaacaggacacaatcaaatagtggaactcttcagcagtctaggctactgtttagccaagctggacccaccagcatgtctcttcaagctaaaaactggctgcctggaccttgctacagacagcagcgtctgtcaaagcaggcaaacgacaacaacaacagcaactttccctggactgcggctacaaagtatcatctaaatggtcgggactcgttggttaatccaggaccagctatggccagccacaaagacgatgaagaaaagtttttccccatgcatggaaccctgatatttggtaaacaaggaacaaatgctaacgacgcggatttggaacatgtcatgattacagatgaagaagaaatcaggaccaccaatcccgtggctacagagcagtacggaaacgtgtcaaataatttgcaaaactcaaatactggtccaactacagaaaatgtcaatcaccagggagcgttacctggtatggtgtggcaggatcgagacgtgtacctgcagggacccatttgggccaagattcctcacaccgacggacactttcgcccttctccactgatgggaggttttggactcaaacacccgcctcctcaaatcatgatcaaaaacactcctgttccagccaatcctcctacaaacttcagcgcggcaaagtttgcttccttcatcacacagtattccacgggacaggtcagcgtggagatcgagtgggagctgcagaaggagaacagcaaacgctggaaccccgagatccagtacacttccaactacaacaaatctgttaatgtggactttactgtggacactaatggtgtgtattcagagcctcgccccattggcaccagatacctgactcgtaatctgtaa

SEQ ID NO: 2175 - DNA, 2208 bp, Artificial Sequence
  Synthetic Polynucleotide
atggctgccgatggttatcttccagattggctcgaggacactctctctgaaggaataagacagtggtggaagctcaaacctggcccaccaccaccaaagcccgcagagcggcatcaggacgacagcaggggtcttgtgcttcctgggtacaagtacctcggacccttcaacggactcgacaaaggagagccggtcaacgaggcagacgctgcggccctcgagcacgacaaggcctacgaccggcagctcgacagcggagacaacccgtacctcaagtacaaccacgccgacgcggagtttcaggagcgtcttaaagaagatacgtcttttgggggcaacctcggacgagcagtcttccaggcgaaaaagagggttcttgaacctctgggcctggttgaggaacctgttaagacggctccgggaaaaaagaggccggtagagcactctcctgcggagccagactcctcctcgggaaccggaaaagcgggccagcagcctgcaagaaagagattgaatttcggtcagactggagacgcagactccgtacctgacccccagcctctcggacagccaccagcagcccccacaagtttgggatctactacaatggctacaggcagtggcgcaccaatggcagacaataacgagggtgccgatggagtgggtaattcctcaggaaattggcattgcgattcccaatggctgggcgacagagtcatcaccaccagcacccgaacctgggccctgcccacctacaacaaccacctctacaagcaaatctccagccaatcaggagcatcgaacgacaaccactactttggctacagcaccccttgggggtattttgacttcaacagattccactgtcacttctccccacgtgactggcaaagactcatcaacaacaactggggattccgacccaagagactcaacttcaagctctttaacattcaagtcaaagaggtcacgcagaatgacggtacgacgacgattgccaataaccttaccagcacggttcaggtgtttactgactcggagtaccagctcccgtacgtcctcggctcggcgcatcaaggatgcctcccgccgtttccagcggacgtcttcatggtcccacagtatggatacctcaccctgaacaacgggagtcaggcggtaggacgctcttccttttactgcctggagtactttccttctcagatgctgcgtaccggaaacaactttaccttcagctacacctttgaggacgtgcctttccacagcagctacgctcacagccagagtttggaccggctgatgaatcctctgatcgaccagtatctgtattatctgaacaggacacaatcaaatagtggaactcttcagcagtctaggctactgtttagccaagctggacccaccagcatgtctcttcaagctaaaaactggctgcctggaccttgctacagacagcagcgtctgtcaaagcaggcaaacgacaacaacaacagcaactttccctggactgcggctacaaagtatcatctaaatggtcgggactcgttggttaatccaggaccagctatggccagccacaaagacgatgaagaaaagtttttccccatgcatggaaccctgatatttggtaaacaaggaacaaatgctaacgacgcggatttggaacatgtcatgattacagatgaagaagaaatcaggaccaccaatcccgtggctacagagcagtacggaaacgtgtcaaataatttgcaaaactcaaatactggtccaactacagaaaatgtcaatcaccagggagcgttacctggtatggtgtggcaggatcgagacgtgtacctgcagggacccatttgggccaagattcctcacaccgacggacactttcacccttctccactgatgggaggttttggactcaaacacccgcctcctcaaatcatgatcaaaaacactcctgttccagccaatcctcctacaaacttcagcgcggcaaagtctgcttccttcatcacacagtattccacgggacaggtcagcgtggagatcgagtgggagctgcagaaggagaacagcaaacgctggaaccccgagatccagtacacttccaactacaacaaatctgttaatgtggactttactgtggacactaatggtgtgtattcagagcctcgccccattggcaccagatacctgactcgtaatctgtaa

SEQ ID NO: 2176 - DNA, 2208 bp, Artificial Sequence
  Synthetic Polynucleotide
atggctgccgatggttatcttccagattggctcgaggacactctctctgaaggaataagacagtggtggaagctcaaacctggcccaccaccaccaaagcccgcagagcggcatcaggacgacagcaggggtcttgtgcttcctgggtacaagtacctcggacccttcaacggactcgacaaaggagagccggtcaacgaggcagacgctgcggccctcgagcacgacaaggcctacgaccggcagctcgacagcggagacaacccgtacctcaagtacaaccacgccgacgcggagtttcaggagcgtcttaaagaagatacgtcttttgggggcaacctcggacgagcagtcttccaggcgaaaaagagggttcttgaacctctgggcctggttgaggaacctgttaagacggctccgggaaaaaagaggccggtagagcactctcctgcggagccagactcctcctcgggaaccggaaaagcgggccagcagcctgcaagaaagagattgaatttcggtcagactggagacgcagactccgtacctgacccccagcctctcggacagccaccagcagcccccacaagtttgggatctactacaatggctacaggcagtggcgcaccaatggcagacaataacgagggtgccgatggagtgggtaattcctcaggaaattggcattgcgattcccaatggctgggcgacagagtcatcaccaccagcacccgaacctgggccctgcccacctacaacaaccacctctacaagcaaatctccagccaatcaggagcatcgaacgacaaccactactttggctacagcaccccttgggggtattttgacttcaacagattccactgtcacttctccccacgtgactggcaaagactcatcaacaacaactggggattccgacccaagagactcaacttcaagctctttaacattcaagtcaaaggggtcacgcagaatgacggtacgacgacgattgccaataaccttaccagcacggttcaggtgtttactgactcggagtaccagctcccgtacgtcctcggctcggcgcatcaaggatgcctcccgccgtttccagcggacgtcttcatggtcccacagtatggatacctcaccctgaacaacgggagtcaggcggtaggacgctcttccttttactgcctggagtactttccttctcagatgctgcgtaccggaaacaactttaccttcagctacacctttgaggacgtgcctttccacagcagctacgctcacagccagagtttggaccggctgatgaatcctctgatcgaccagtatctgtattatctgaacaggacacaatcaaatagtggaactcttcagcagtctaggctactgtttagccaagctggacccaccagcatgtctcttcaagctaaaaactggctgcctggaccttgctacagacagcagcgtctgtcaaagcaggcaaacgacaacaacaacagcaactttccctggactgcggctacaaagtatcatctaaatggtcgggactcgttggttaatccaggaccagctatggccagccacaaagacgatgaagaaaagtttttccccatgcatggaaccctgatatttggtaaacaaggaacaaatgctaacgacgcggatttggaacatgtcatgattacagatgaagaagaaatcaggaccaccaatcccgtggctacagagcagtacggaaacgtgtcaaataatttgcaaaactcaaatactggtccaactacagaaaatgtcaatcaccagggagcgttacctggtatggtgtggcaggatcgagacgtgtacctgcagggacccatttgggccaagattcctcacaccgacggacactttcacccttctccactgatgggaggttttggactcaaacacccgcctcctcaaatcatgatcaaaaacactcctgttccagccaatcctcctacaaacttcagcgcggcaaagtttgcttccttcatcacacagtattccacgggacaggtcagcgtggagatcgagtgggagctgcagaaggagaacagcaaacgctggaaccccgagatccagtacacttccaactacaacaaatctgttaatgtggactttactgtggacactaatggtgtgtattcagagcctcgccccattggcaccagatacctgactcgtaatctgtaa

SEQ ID NO: 2177 - DNA, 2208 bp, Artificial Sequence
  Synthetic Polynucleotide
atggctgccgatggttatcttccagattggctcgaggacactctctctgaaggaataagacagtggtggaagctcaaacctggcccaccaccaccaaagcccgcagagcggcatcaggacgacagcaggggtcttgtgcttcctgggtacaagtacctcggacccttcaacggactcgacaaaggagagccggtcaacgaggcagacgctgcggccctcgagcacgacaaggcctacgaccggcagctcgacagcggagacaacccgtacctcaagtacaaccacgccgacgcggagtttcaggagcgtcttaaagaagatacgtcttttgggggcaacctcggacgagcagtcttccaggcgaaaaagagggttcttgaacctctgggcctggttgaggaacctgttaagacggctccgggaaaaaagaggccggtagagcactctcctgcggagccagactcctcctcgggaaccggaaaagcgggccagcagcctgcaagaaagagattgaatttcggtcagactggagacgcagactccgtacctgacccccagcctctcggacagccaccagcagcccccacaagtttgggatctactacaatggctacaggcagtggcgcaccaatggcagacaataacgagggtgccgatggagtgggtaattcctcaggaaattggcattgcgattcccaatggctgggcgacagagtcatcaccaccagcacccgaacctgggccctgcccacctacaacaaccacctctacaagcaaatctccagccaatcaggagcatcgaacgacaaccactactttggctacagcaccccttgggggtattttgacttcaacagattccactgtcacttctccccacgtgactggcaaagactcatcaacaacaactggggattccgacccaagagactcaacttcaagctctttaacattcaagtcaaagaggtcacgcagaatgacggtacgacgacgattgccaataaccttaccagcacggttcaggtgtttactgactcggagtaccagctcccgtacgtcctcggctcggcgcatcaaggatgcctcccgccgtttccagcggacgtcttcatggtcccacagtatggatacctcaccctgaacaacgggagtcaggcggtaggacgctcttccttttactgcctggagtactttccttctcagatgctgcgtaccggaaacaactttaccttcagctacacctttgaggacgtgcctttccacagcagctacgctcacagccagagtttggaccggctgatgaatcctctgatcgaccagtatctgtattatctgaacaggacacaatcaaatagtggaactcttcagcagtctaggctactgtttagccaagctggacccaccagcatgtctcttcaagctaaaaactggctgcctggaccttgctacagacagcagcgtctgtcaaagcaggcaaacgacaacaacaacagcaactttccctggactgcggctacaaagtatcatctaaatggtcgggactcgttggttaatccaggaccagctatggccagccacaaagacgatgaagaaaagtttttccccatgcatggaaccccgatatttggtaaacaaggaacaaatgctaacgacgcggatttggaacatgtcatgattacagatgaagaagaaatcaggaccaccaatcccgtggctacagagcagtacggaaacgtgtcaaataatttgcaaaactcaaatactggtccaactacagaaaatgtcaatcaccagggagcgttacctggtatggtgtggcaggatcgagacgtgtacctgcagggacccatttgggccaagattcctcacaccgacggacactttcacccttctccactgatgggaggttttggactcaaacacccgcctcctcaaatcatgatcaaaaacactcctgttccagccaatcctcctacaaacttcagcgcggcaaagtttgcttccttcatcacacagtattccacgggacaggtcagcgtggagatcgagtgggagctgcagaaggagaacagcaaacgctggaaccccgagatccagtacacttccaactacaacaaatctgttaatgtggactttactgtggacactaatggtgtgtattcagagcctcgccccattggcaccagatacctgactcgtaatctgtaa

SEQ ID NO: 2178 - DNA, 2208 bp, Artificial Sequence
  Synthetic Polynucleotide
atggctgccgatggttatcttccagattggctcgaggacactctctctgaaggaataagacagtggtggaagctcaaacctggcccaccaccaccaaagcccgcagagcggcatcaggacgacagcaggggtcttgtgcttcctgggtacaagtacctcggacccttcaacggactcgacaaaggagagccggtcaacgaggcagacgctgcggccctcgagcacgacaaggcctacgaccggcagctcgacagcggagacaacccgtacctcaagtacaaccacgccgacgcggagtttcaggagcgtcttaaagaagatacgtcttttgggggcaacctcggacgagcagtcttccaggcgaaaaagggggttcttgaacctctgggcctggttgaggaacctgttaagacggctccgggaaaaaagaggccggtagagcactctcctgcggagccagactcctcctcgggaaccggaaaagcgggccagcagcctgcaagaaagagattgaatttcggtcagactggagacgcagactccgtacctgacccccagcctctcggacagccaccagcagcccccacaagtttgggatctactacaatggctacaggcagtggcgcaccaatggcagacaataacgagggtgccgatggagtgggtaattcctcaggaaattggcattgcgattcccaatggctgggcgacagagtcatcaccaccagcacccgaacctgggccctgcccacctacaacaaccacctctacaagcaaatctccagccaatcaggagcatcgaacgacaaccactactttggctacagcaccccttgggggtattttgacttcaacagattccactgtcacttctccccacgtgactggcaaagactcatcaacaacaactggggattccgacccaagagactcaacttcaagctctttaacattcaagtcaaagaggtcacgcagaatgacggtacgacgacgattgccaataaccttaccagcacggttcaggtgtttactgactcggagtaccagctcccgtacgtcctcggctcggcgcatcaaggatgcctcccgccgtttccagcggacgtcttcatggtcccacagtatggatacctcaccctgaacaacgggagtcaggcggtaggacgctcttccttttactgcctggagtactttccttctcagatgctgcgtaccggaaacaactttaccttcagctacacctttgaggacgtgcctttccacagcagctacgctcacagccagagtttggaccggctgatgaatcctctgatcgaccagtatctgtattatctgaacaggacacaatcaaatagtggaactcttcagcagtctaggctactgtttagccaagctggacccaccagcatgtctcttcaagctaaaaactggctgcctggaccttgctacagacagcagcgtctgtcaaagcaggcaaacgacaacaacaacagcaactttccctggactgcggctacaaagtatcatctaaatggtcgggactcgttggttaatccaggaccagctatggccagccacaaagacgatgaagaaaagtttttccccatgcatggaaccctgatatttggtaaacaaggaacaaatgctaacgacgcggatttggaacatgtcatgattacagatgaagaagaaatcaggaccaccaatcccgtggctacagagcagtacggaaacgtgtcaaataatttgcaaaactcaaatactggtccaactacagaaaatgtcaatcaccagggagcgttacctggtatggtgtggcaggatcgagacgtgtacctgcagggacccatttgggccaagattcctcacaccgacggacactttcacccttctccactgatgggaggttttggactcaaacacccgcctcctcaaatcatgatcaaaaacactcctgttccagccaatcctcctacaaacttcagcgcggcaaagtttgcttccttcatcacacagtattccacgggacaggtcagcgtggagatcgagtgggagctgcagaaggagaacagcaaacgctggaaccccgagatccagtacacttccaactacaacaaatctgttaatgtggactttactgtggacactaatggtgtgtattcagagcctcgccccattggcaccagatacctgactcgtaatctgtaa

SEQ ID NO: 2179 - DNA, 2208 bp, Artificial Sequence
  Synthetic Polynucleotide
atggctgccgatggttatcttccagattggctcgaggacactctctctgaaggaataagacagtggtggaagctcaaacctggcccaccaccaccaaagcccgcagagcggcatcaggacgacagcaggggtcttgtgcttcctgggtacaagtacctcggacccttcaacggactcgacaaaggagagccggtcaacgaggcagacgctgcggccctcgagcacgacaaggcctacgaccggcagctcgacagcggagacaacccgtacctcaagtacaaccacgccgacgcggagtttcaggagcgtcttaaagaagatacgtcttttgggggcaacctcggacgagcagtcttccaggcgaaaaagagggttcttgaacctctgggcctggttgaggaacctgttaagacggctccgggaaaaaagaggccggtagagcactctcctgcggagccagactcctcctcgggaaccggaaaagcgggccagcagcctgcaagaaagagattgaatttcggtcagactggagacgcagactccgtacctgacccccagcctctcggacagccaccagcagcccccacaagtttgggatctactacaatggctacaggcagtggcgcaccaatggcagacaataacgagggtgccgatggagtgggtaattcctcaggaaattggcattgcgattcccaatggctgggcgacagagtcatcaccaccagcacccgaacctgggccctgcccacctacaacaaccacctctacaagcaaatctccagccaatcaggagcatcgaacgacaaccactactttggctacagcaccccttgggggtattttgacttcaacagattccactgtcacttctccccacgtgactggcaaagactcatcaacaacaactggggattccgacccaagagactcaacttcaagctctttaacattcaagtcaaagaggtcacgcagaatgacggtacgacgacgattgccaataaccttaccagcacggttcaggtgtttactgactcggagtaccagctcccgtacgtcctcggctcggcgcatcaaggatgcctcccgccgtttccagcggacgtcttcatggtcccacagtatggatacctcaccctgaacaacgggagtcaggcggtaggacgctcttccttttactgcctggagtactttccttctcagatgctgcgtaccggaaacaactttaccttcagctacacctttgaggacgtgcctttccacagcagctacgctcacagccagagtttggaccggctgatgaatcctctgatcggccagtatctgtattatctgaacaggacacaatcaaatagtggaactcttcagcagtctaggctactgtttagccaagctggacccaccagcatgtctcttcaagctaaaaactggctgcctggaccttgctacagacagcagcgtctgccaaagcaggcaaacgacaacaacaacagcaactttccctggactgcggctacaaagtatcatctaaatggtcgggactcgttggttaatccaggaccagctatggccagccacaaagacgatgaagaaaagtttttccccatgcatggaaccctgatatttggtaaacaaggaacaaatgctaacgacgcggatttggaacatgtcatgattacagatgaagaagaaatcaggaccaccaatcccgtggctacagagcagtacggaaacgtgtcaaataatttgcaaaactcaaatactggtccaactacagaaaatgtcaatcaccagggagcgttacctggtatggtgtggcaggatcgagacgtgtacctgcagggacccatttgggccaagattcctcacaccgacggacactttcacccttctccactgatgggaggttttggactcaaacacccgcctcctcaaatcatgatcaaaaacactcctgttccagccaatcctcctacaaacttcagcgcggcaaagtttgcttccttcatcacacagtattccacgggacaggtcagcgtggagatcgagtgggagctgcagaaggagaacagcaaacgctggaaccccgagatccagtacacttccaactacaacaaatctgttaatgtggactttactgtggacactaatggtgtgtattcagagcctcgccccattggcaccagatacctgactcgtaatctgtaa

SEQ ID NO: 2180 - DNA, 2208 bp, Artificial Sequence
  Synthetic Polynucleotide
atggctgccgatggttatcttccagattggctcgaggacactctctctgaaggaataagacagtggtggaagctcaaacctggcccaccaccaccaaagcccgcagagcggcatcaggacgacagcaggggtcttgtgcttcctgggtacaagtacctcggacccttcaacggactcgacaaaggagagccggtcaacgaggcagacgctgcggccctcgagcacgacaaggcctacgaccggcagctcgacagcggagacaacccgtacctcaagtacaaccacgccgacgcggagtttcaggagcgtcttaaagaagatacgtcttttgggggcaacctcggacgagcagtcttccaggcgaaaaagagggttcttgaacctctgggcctggttgaggaacctgttaagacggctccgggaaaaaagaggccggtagagcactctcctgcggagccagactcctcctcgggaaccggaaaagcgggccagcagcctgcaagaaagagattgaatttcggtcagactggagacgcagactccgtacctgacccccagcctctcggacagccaccagcagcccccacaagtttgggatctactacaatggctacaggcagtggcgcaccaatggcagacaataacgagggtgccgatggagtgggtaattcctcaggaaattggcattgcgattcccaatggctgggcgacagagtcatcaccaccagcacccgaacctgggccctgcccacctacaacaaccacctctacaagcaaatctccagccaatcaggagcatcgaacgacaaccactactttggctacagcaccccttgggggtattttgacttcaacagattccactgtcacttctccccacgtgactggcaaagactcatcaacaacaactggggattccgacccaagagactcaacttcaagctctttaacattcaagtcaaagaggtcacgcagaatgacggtacgacgacgattgccaataaccttaccagcacggttcaggtgtttactgactcggagtaccagctcccgtacgtcctcggctcggcgcatcaaggatgcctcccgccgtttccagcggacgtcttcatggtcccacagtatggatacctcaccctgaacaacgggagtcaggcggtaggacgctcttccttttactgcctggagtactttccttctcagatgctgcgtaccggaaacaactttaccttcagctacacctttgaggacgtgcctttccacagcagctacgctcacagccagagtttggaccggctgatgaatcctctgatcgaccagtatctgtattatctgaacaggacacaatcaaatagtggaactcttcagcagtctaggctactgtttagccaagctggacccaccagcatgtctcttcaagctaaaaactggctgcctggaccttgctacagacagcagcgtctgtcaaagcaggcaaacgacaacaacaacagcaactttccctggactgcggctacaaagtatcatctaaatggtcgggactcgttggttaatccaggaccagctatggccagccacaaagacgatgaagaaaagtttttccccatgcatggaaccctgatatttggtaaacaaggaacaaatgctaacgacgcggatttggaacatgtcatgattacagatgaagaagaaatcaggaccaccaatcccgtggctacagagcagtacggaaacgtgtcaaataatttgcaaaactcaaatactggtccaactacagaaaatgtcaatcaccagggagcgttacctggtatggtgtggcaggatcgagacgtgtacctgcagggacccatttgggccaagattcctcacaccgacggacgctttcacccttctccactgatgggaggttttggactcaaacacccgcctcctcaaatcatgatcaaaaacactcctgttccagccaatcctcctacaaacttcagcgcggcaaagtttgcttccttcatcacacagtattccacgggacaggtcagcgtggagatcgagtgggagctgcagaaggagaacagcaaacgctggaaccccgagatccagtacacttccaactacaacaaatctgttaatgtggactttactgtggacactaatggtgtgtattcagagcctcgccccattggcaccagatacctgactcgtaatctgtaa

SEQ ID NO: 2181 - DNA, 2208 bp, Artificial Sequence
  Synthetic Polynucleotide
atggctgccgatggttatcttccagattggctcgaggacactctctctgaaggaataagacagtggtggaagctcaaacctggcccaccaccaccaaagcccgcagagcggcatcaggacgacagcaggggtcttgtgcttcctgggtacaagtacctcggacccttcaacggactcgacaaaggagagccggtcaacgaggcagacgctgcggccctcgagcacgacaaggcctacgaccggcagctcgacagcggagacaacccgtacctcaagtacaaccacgccgacgcggagtttcaggagcgtcttaaagaagatacgtcttttgggggcaacctcggacgagcagtcttccaggcgaaaaagagggttcttgaacctctgggcctggttgaggaacctgttaagacggctccgggaaaaaagaggccggtagagcactctcctgcggagccagactcctcctcgggaaccggaaaagcgggccagcagcctgcaagaaagagattgaatttcggtcagactggagacgcagactccgtacctgacccccagcctctcggacagccaccagcagcccccacaagtttgggatctactacaatggctacaggcagtggcgcaccaatggcagacaataacgagggtgccgatggagtgggtaattcctcaggaaattggcattgcgattcccaatggctgggcgacagagtcatcaccaccagcacccgaacctgggccctgcccacctacaacaaccacctctacaagcaaatctccagccaatcaggagcatcgaacgacaaccactactttggctacagcaccccttgggggtattttgacttcaacagattccactgtcacttctccccacgtgactggcaaagactcatcaacaacaactggggattccgacccaagagactcaacttcaagctctttaacattcaagtcaaagaggtcacgcagaatgacggtacgacgacgattgccaataaccttaccagcacggttcaggtgtttactgactcggagtaccagctcccgtacgtcctcggctcggcgcatcaaggatgcctcccgccgtttccagcggacgtcttcatggtcccacagtatggatacctcaccctgaacaacgggagtcaggcggtaggacgctcttccttttactgcctggagtactttccttctcagatgctgcgtaccggaaacaactttaccttcagctacacctttgaggacgtgcctttccacagcagctacgctcacagccagagtttggaccggctgatgaatcctctgatcgaccagtatctgtattatctgaacaggacacaatcaaatagtggaactcttcagcagtctaggctactgtttagccaagctggacccaccagcatgtctcttcaagctaaaaactggctgcctggaccttgctacagacagcagcgtctgtcaaagcaggcaaacgacaacaacaacagcaactttccctggactgcggctacaaagtatcatctaaatggtcgggactcgttggttaatccaggaccagctatggccagccacaaagacgatgaagaaaagtttttccccatgcatggagccctgatatttggtaaacaaggaacaaatgctaacgacgcggatttggaacatgtcatgattacagatgaagaagaaatcaggaccaccaatcccgtggctacagagcagtacggaaacgtgtcaaataatttgcaaaactcaaatactggtccaactacagaaaatgtcaatcaccagggagcgttacctggtatggtgtggcaggatcgagacgtgtacctgcagggacccatttgggccaagattcctcacaccgacggacactttcacccttctccactgatgggaggttttggactcaaacacccgcctcctcaaatcatgatcaaaaacactcctgttccagccaatcctcctacaaacttcagcgcggcaaagtttgcttccttcatcacacagtattccacgggacaggtcagcgtggagatcgagtgggagctgcagaaggagaacagcaaacgctggaaccccgagatccagtacacttccaactacaacaaatctgttaatgtggactttactgtggacactaatggtgtgtattcagagcctcgccccattggcaccagatacctgactcgtaatctgtaa

SEQ ID NO: 2182 - DNA, 2208 bp, Artificial Sequence
  Synthetic Polynucleotide
atggctgccgatggttatcttccagattggctcgaggacactctctctgaaggaataagacagtggtggaagctcaaacctggcccaccaccaccaaagcccgcagagcggcatcaggacgacagcaggggtcttgtgcttcctgggtacaagtacctcggacccttcaacggactcgacaaaggagagccggtcaacgaggcagacgctgcggccctcgagcacgacaaggcctacgaccggcagctcgacagcggagacaacccgtacctcaagtacaaccacgccgacgcggagtttcaggagcgtcttaaagaagatacgtcttttgggggcaacctcggacgagcagtcttccaggcgaaaaagagggttcttgaacctctgggcctggttgaggaacctgttaagacggctccgggaaaaaagaggccggtagagcactctcctgcggagccagactcctcctcgggaaccggaaaagcgggccagcagcctgcaagaaagagattgaatttcggtcagactggagacgcagactccgtacctgacccccagcctctcggacagccaccagcagcccccacaagtttgggatctactacaatggctacaggcagtggcgcaccaatggcagacaataacgagggtgccgatggagtgggtaattcctcaggaaattggcattgcgattcccaatggctgggcgacagagtcatcaccaccagcacccgaacctgggccctgcccacctacaacaaccacctctacaagcaaatctccagccaatcaggagcatcgaacgacaaccactactttggctacagcaccccttgggggtattttgacttcaacagattccactgtcacttctccccacgtgactggcaaagactcatcaacaacaactggggattccgacccaagagactcaacttcaagctctttaacattcaagtcaaagaggtcacgcagaatgacggtacgacgacgattgccaataaccttaccagcacggttcaggtgtttactgactcggagtaccagctcccgtacgtcctcggctcggcgcatcaaggatgcctcccgccgtttccagcggacgtcttcatggtcccacagtatggatacctcaccctgaacaacgggagtcaggcggtaggacgctcttccttttactgcctggagtactttccttctcagatgctgcgtaccggaaacaactttaccttcagctacacctttgaggacgtgcctttccacagcagctacgctcacagccagagtttggaccggctgatgaatcctctgatcgaccagtatctgtattatctgaacaggacacaatcaaatagtggaactcttcagcagtctaggctactgtttagccaagctggacccaccagcatgtctcttcaagctaaaaactggctgcctggaccttgctacagacagcagcgtctgtcaaagcaggcaaacgacaacaacaacagcaactttccctggactgcggctacaaagtatcatctaaatggtcgggactcgttggttaatccaggaccagctatggccagccacaaagacgatgaagaaaagtttttccccatgcatggaaccctgatatttggtaaacaaggaacaaatgctaacgacgcggatttggaacatgccatgattacagatgaagaagaaatcaggaccaccaatcccgtggctacagagcagtacggaaacgtgtcaaataatttgcaaaactcaaatactggtccaactacagaaaatgtcaatcaccagggagcgttacctggtatggtgtggcaggatcgagacgtgtacctgcagggacccatttgggccaagattcctcacaccgacggacactttcacccttctccactgatgggaggttttggactcaaacacccgcctcctcaaatcatgatcaaaaacactcctgttccagccaatcctcctacaaacttcagcgcggcaaagtttgcttccttcatcacacagtattccacgggacaggtcagcgtggagatcgagtgggagctgcagaaggagaacagcaaacgctggaaccccgagatccagtacacttccaactacaacaaatctgttaatgtggactttactgtggacactaatggtgtgtattcagagcctcgccccattggcaccagatacctgactcgtaatctgtaa

SEQ ID NO: 2183 - DNA, 2208 bp, Artificial Sequence
  Synthetic Polynucleotide
atggctgccgatggttatcttccagattggctcgaggacactctctctgaaggaataagacagtggtggaagctcaaacctggcccaccaccaccaaagcccgcagagcggcatcaggacgacagcaggggtcttgtgcttcctgggtacaagtacctcggacccttcaacggactcgacaaaggagagccggtcaacgaggcagacgctgcggccctcgagcacgacaaggcctacgaccggcagctcgacagcggagacaacccgtacctcaagtacaaccacgccgacgcggagtttcaggagcgtcttaaagaagatacgtcttttgggggcaacctcggacgagcagtcttccaggcgaaaaagagggttcttgaacctctgggcctggttgaggaacctgttaagacggctccgggaaaaaagaggccggtagagcactctcctgcggagccagactcctcctcgggaaccggaaaagcgggccagcagcctgcaagaaagagattgaatttcggtcagactggagacgcagactccgtacctgacccccagcctctcggacagccaccagcagcccccacaagtttgggatctactacaatggctacaggcagtggcgcaccaatggcagacaataacgagggtgccgatggagtgggtaattcctcaggaaattggcattgcgattcccaatggctgggcgacagagtcatcaccaccagcacccgaacctgggccctgcccacctacaacaaccacctctacaagcaaatctccagccaatcaggagcatcgaacgacaaccactactttggctacagcaccccttgggggtattttgacttcaacagattccactgtcacttctccccacgtgactggcaaagactcatcaacaacaactggggattccgacccaagagactcaacttcaagctctttaacattcaagtcaaagaggtcacgcagaatgacggtacgacgacgattgccaataaccttaccagcacggttcaggtgtttactgactcggagtaccagctcccgtacgtcctcggctcggcgcatcaaggatgcctcccgccgtttccagcggacgtcttcatggtcccacagtatggatacctcaccctgaacaacgggagtcaggcggtaggacgctcttccttttactgcctggagtactttccttctcagatgctgcgtaccggaaacaactttaccttcagctacacctttgaggacgtgcctttccacagcagctacgctcacagccagagtttggaccggctgatgaatcctctgatcgaccagtatctgtattatctgaacaggacacaatcaaatagtggaactcttcagcagtctaggctactgtttagccaagctggacccaccagcatgtctcttcaagctaaaaactggctgcctggaccttgctacagacagcagcgtctgtcaaagcaggcaaacgacaacaacaacagcaactttccctggactgcggctacaaagtatcatctaaatggtcgggactcgttggttaatccaggaccagctatggccagccacaaagacgatgaagaaaagtttttccccatgcatggaaccctgatatttggtaaacaaggaacaaatgctaacgacgcggatttggaacatgtcatgattacagatgaagaagaaatcaggaccaccaatcccgtggctacagagcagtacggaaacgtgtcaaataatttgcaaaactcaaatactggtccaactacagaaaatgtcaatcaccagggagcgttacctggtatggtgtggcaggatcgagacgtgtacctgcagggacccatttgggccaagattcctcacaccgacggacactttcacccttctccactgatgggaggttttggactcaaacacccgcctcctcaaatcatgatcaaaaacactcctgttccagccaatcctcctacaaacttcagcgcggcaaagtttgcttccttcatcacacagtattccacgggacaggtcagcgtggagatcgagtgggagctgcagaaggagaacagcaaacgctggaaccccgagatccggtacacttccaactacaacaaatctgttaatgtggactttactgtggacactaatggtgtgtattcagagcctcgccccattggcaccagatacctgactcgtaatctgtaa

SEQ ID NO: 2184 - DNA, 2208 bp, Artificial Sequence
  Synthetic Polynucleotide
atggctgccgatggttatcttccagattggctcgaggacactctctctgaaggaataagacagtggtggaagctcaaacctggcccaccaccaccaaagcccgcagagcggcatcaggacgacagcaggggtcttgtgcttcctgggtacaagtacctcggacccttcaacggactcgacaaaggagagccggtcaacgaggcagacgctgcggccctcgagcacgacaaggcctacgaccggcagctcgacagcggagacaacccgtacctcaagtacaaccacgccgacgcggagtttcaggagcgtcttaaagaagatacgtcttttgggggcaacctcggacgagcagtcttccaggcgaaaaagagggttcttgaacctctgggcctggttgaggaacctgttaagacggctccgggaaaaaagaggccggtagagcactctcctgcggagccagactcctcctcgggaaccggaaaagcgggccagcagcctgcaagaaagagattgaatttcggtcagactggagacgcagactccgtacctgacccccagcctctcggacagccaccagcagcccccacaagtttgggatctactacaatggctacaggcagtggcgcaccaatggcagacaataacgagggtgccgatggagtgggtaattcctcaggaaattggcattgcgattcccaatggctgggcgacagagtcatcaccaccagcacccgaacctgggccctgcccacctacaacaaccacctctacaagcaaatctccagccaatcaggagcatcgaacgacaaccactactttggctacagcaccccttgggggtattttgacttcaacagattccactgtcacttctccccacgtgactggcaaagactcatcaacaacaactggggattccgacccaagagactcaacttcaagctctttaacattcaagtcaaagaggtcacgcagaatgacggtacgacgacgattgccaataaccttaccagcacggttcaggtgtttactgactcggagtaccagctcccgtacgtcctcggctcggcgcatcaaggatgcctcccgccgtttccagcggacgtcttcatggtcccacagtatggatacctcaccctgaacaacgggagtcaggcggtaggacgctcttccttttactgcctggagtactttccttctcagatgctgcgtaccggaaacaactttaccttcagctacacctttgaggacgtgcctttccacagcagctacgctcacagccagagtttggaccggctgatgaatcctctgatcgaccagtatctgtattatctgaacaggacacaatcaaatagtggaactcttcagcagtctaggctactgtttagccaagctggacccaccagcatgtctcttcaagctaaaaactggctgcctggaccttgctacagacagcagcgtctgtcaaagcaggcaaacgacaacaacaacagcaactttccccggactgcggctacaaagtatcatctaaatggtcgggactcgttggttaatccaggaccagctatggccagccacaaagacgatgaagaaaagtttttccccatgcatggaaccctgatatttggtaaacaaggaacaaatgctaacgacgcggatttggaacatgtcatgattacagatgaagaagaaatcaggaccaccaatcccgtggctacagagcagtacggaaacgtgtcaaataatttgcaaaactcaaatactggtccaactacagaaaatgtcaatcaccagggagcgttacctggtatggtgtggcaggatcgagacgtgtacctgcagggacccatttgggccaagattcctcacaccgacggacactttcacccttctccactgatgggaggttttggactcaaacacccgcctcctcaaatcatgatcaaaaacactcctgttccagccaatcctcctacaaacttcagcgcggcaaagtttgcttccttcatcacacagtattccacgggacaggtcagcgtggagatcgagtgggagctgcagaaggagaacagcaaacgctggaaccccgagatccagtacacttccaactacaacaaatctgttaatgtggactttactgtggacactaatggtgtgtattcagagcctcgccccattggcaccagatacctgactcgtaatctgtaa

SEQ ID NO: 2185 - DNA, 2208 bp, Artificial Sequence
  Synthetic Polynucleotide
atggctgccgatggttatcttccagattggctcgaggacactctctctgaaggaataagacagtggtggaagctcaaacctggcccaccaccaccaaagcccgcagagcggcatcaggacgacagcaggggtcttgtgcttcctgggtacaagtacctcggacccttcaacggactcgacaaaggagagccggtcaacgaggcagacgctgcggccctcgagcacgacaaggcctacgaccgacagctcgacagcggagacaacccgtacctcaagtacaaccacgccgacgcggagtttcaggagcgtcttaaagaagatacgtcttttgggggcaacctcggacgagcagtcttccaggcgaaaaagagggttcttgaacctctgggcctggttgaggaacctgttaagacggctccgggaaaaaagaggccggtagagcactctcctgcggagccagactcctcctcgggaaccggaaaagcgggccagcagcctgcaagaaagagattgaatttcggtcagactggagacgcagactccgtacctgacccccagcctctcggacagccaccagcagcccccacaagtttgggatctactacaatggctacaggcagtggcgcaccaatggcagacaataacgagggtgccgatggagtgggtaattcctcaggaaattggcattgcgattcccaatggctgggcgacagagtcatcaccaccagcacccgaacctgggccctgcccacctacaacaaccacctctacaagcaaatctccagccaatcaggagcatcgaacgacaaccactactttggctacagcaccccttgggggtattttgacttcaacagattccactgtcacttctccccacgtgactggcaaagactcatcaacaacaactggggattccgacccaagagactcaacttcaagctctttaacattcaagtcaaagaggtcacgcagaatgacggtacgacgacgattgccaataaccttaccagcacggttcaggtgtttactgactcggagtaccagctcccgtacgtcctcggctcggcgcatcaaggatgcctcccgccgtttccagcggacgtcttcatggtcccacagtatggatacctcaccctgaacaacgggagtcaggcggtaggacgctcttccttttactgcctggagtactttccttctcagatgctgcgtaccggaaacaactttaccttcagctacacctttgaggacgtgcctttccacagcagctacgctcacagccagagtttggaccggctgatgaatcctctgatcggccagtatctgtattatctgaacaggacacaatcaaatagtggaactcttcagcagtctaggctactgtttagccaagctggacccaccagcatgtctcttcaagctaaaaactggctgcctggaccttgctacagacagcagcgtctgtcaaagcaggcaaacgacaacaacaacagcaactttccctggactgcggctacaaagtatcatctaaatggtcgggactcgttggttaatccaggaccagctatggccagccacaaagacgatgaagaaaagtttttccccatgcatggaaccctgatatttggtaaacaaggaacaaatgctaacgacgcggatttggaacatgtcatgattacagatgaagaagaaatcaggaccaccaatcccgtggctacagagcagtacggaaacgtgtcaaataatttgcaaaactcaaatactggtccaactacagaaaatgtcaatcaccagggagcgttacctggtatggtgtggcaggatcgagacgtgtacctgcagggacccatttgggccaagattcctcacaccgacggacactttcacccttctccactgatgggaggttttggactcaaacacccgcctcctcaaatcatgatcaaaaacactcctgttccagccaatcctcctacaaacttcagcgcggcaaagtttgcttccttcatcacacagtattccacgggacaggtcagcgtggagatcgagtgggagctgcagaaggagaacagcaaacgctggaaccccgagatccagtacacttccaactacaacaaatctgttaatgtggactttactgtggacactaatggtgtgtattcagagcctcgccccattggcaccagatacctgactcgtaatctgtaa

SEQ ID NO: 2186 - DNA, 2208 bp, Artificial Sequence
  Synthetic Polynucleotide
atggctgccgatggttatcttccagattggctcgaggacactctctctgaaggaataagacagtggtggaagctcaaacctggcccaccaccaccaaagcccgcagagcggcatcaggacgacagcaggggtcttgtgcttcctgggtacaagtacctcggacccttcaacggactcgacaaaggagagccggtcaacgaggcagacgctgcggccctcgagcacgacaaggcctacgaccggcagctcgacagcggagacaacccgtacctcaagtacaaccacgccgacgcggagtttcaggagcgtcttaaagaagatacgtcttttgggggcaacctcggacgagcagtcttccaggcgaaaaagagggttcttgaacctctgggcctggttgaggaacctgttaagacggctccgggaaaaaagaggccggtagagcactctcctgcggagccagactcctcctcgggaaccggaaaagcgggccagcagcctgcaagaaagagattgaatttcggtcagactggagacgcagactccgtacctgacccccagcctctcggacagccaccagcagcccccacaagtttgggatctactacaatggctacaggcagtggcgcaccaatggcagacaataacgagggtgccgatggagtgggtaattcctcaggaaattggcattgcgattcccaatggctgggcgacagagtcatcaccaccagcacccgaacctgggccctgcccacctacaacaaccacctctacaagcaaatctccagccaatcaggagcatcgaacgacaaccactactttggctacagcaccccttgggggtattttgacttcaacagattccactgtcacttctccccacgtgactggcaaagactcatcaacaacaactggggattccgacccaagagactcaacttcaagctctttaacattcaagtcaaagaggtcacgcagaatgacggtacgacgacgattgccaataaccttaccagcacggttcaggtgtttactgactcggagtaccagctcccgtacgtcctcggctcggcgcatcaaggatgcctcccgccgtttccagcggacgtcttcatggtcccacagtatggatacctcaccctgaacaacgggagtcaggcggtaggacgctcttccttttactgcctggagtactttccttctcagatgctgcgtaccggaaacaactttaccttcagctacacctttgaggacgtgcctttccacagcagctacgctcacagccagagtttggaccggctgatgaatcctctgatcgaccagtatctgtattatctgaacaggacacaatcaaatagtggaactcttcagcagtctaggctactgtttagccaagctggacccaccagcatgtctcttcaagctaaaaactggctgcctggaccttgctacagacagcagcgtctgtcaaagcaggcaaacgacaacaacaacagcaactttccctggactgcggctacaaagtatcatctaaatggtcgggactcgttggttaatccaggaccagctatggccagccacaaagacgatgaagaaaagtttttccccatgcatggaaccctgatatttggtaaacaaggaacaaatgctaacgacgcggatttggaacatgtcatgattacagatgaagaagaaatcaggaccaccaatcccgtggctacagagcagtacggaaacgtgtcaaataatttgcaaaactcaaatactggtccaactacagaaaatgtcaatcaccagggagcgttacctggtatggtgtggcaggatcgagacgtgtacctgcagggacccatttgggccaagattcctcacaccgacggacactttcacccttctccactgatgggaggttttggactcaaacacccgcctcctcaaatcatgatcaaaaacactcctgttccagccaatcctcctacaaacttcagcgcggcaaagtttgcttccttcatcacacagtattccacgggacaggtcggcgtggagatcgagtgggagctgcagaaggagaacagcaaacgctggaaccccgagatccagtacacttccaactacaacaaatctgttaatgtggactttactgtggacactaatggtgtgtattcagagcctcgccccattggcaccagatacctgactcgtaatctgtaa

SEQ ID NO: 2187 - DNA, 2208 bp, Artificial Sequence
  Synthetic Polynucleotide
atggctgccgatggttatcttccagattggctcgaggacactctctctgaaggaataagacagtggtggaagctcaaacctggcccaccaccaccaaagcccgcagagcggcatcaggacgacagcaggggtcttgtgcttcctgggtacaagtacctcggacccttcaacggactcgacaaaggagagccggtcaacgaggcagacgctgcggccctcgagcacgacaaggcctacgaccggcagctcgacagcggagacaacccgtacctcaagtacaaccacgccgacgcggagtttcaggagcgtcttaaagaagatacgtcttttgggggcaacctcggacgagcagtcttccaggcgaaaaagagggttcttgaacctctgggcctggttgaggaacctgttaagacggctccgggaaaaaagaggccggtagagcactctcctgcggagccagactcctcctcgggaaccggaaaagcgggccagcagcctgcaagaaagagattgaatttcggtcagactggagacgcagactccgtacctgacccccagcctctcggacagccaccagcagcccccacaagtttgggatctactacaatggctacaggcagtggcgcaccaatggcagacaataacgagggtgccgatggagtgggtaattcctcaggaaattggcattgcgattcccaatggctgggcgacagagccatcaccaccagcacccgaacctgggccctgcccacctacaacaaccacctctacaagcaaatctccagccaatcaggagcatcgaacgacaaccactactttggctacagcaccccttgggggtattttgacttcaacagattccactgtcacttctccccacgtgactggcaaagactcatcaacaacaactggggattccgacccaagagactcaacttcaagctctttaacattcaagtcaaagaggtcacgcagaatgacggtacgacgacgattgccaataaccttaccagcacggttcaggtgtttactgactcggagtaccagctcccgtacgtcctcggctcggcgcatcaaggatgcctcccgccgtttccagcggacgtcttcatggtcccacagtatggatacctcaccctgaacaacgggagtcaggcggtaggacgctcttccttttactgcctggagtactttccttctcagatgctgcgtaccggaaacaactttaccttcagctacacctttgaggacgtgcctttccacagcagctacgctcacagccagagtttggaccggctgatgaatcctctgatcgaccagtatctgtattatctgaacaggacacaatcaaatagtggaactcttcagcagtctaggctactgtttagccaagctggacccaccagcatgtctcttcaagctaaaaactggctgcctggaccttgctacagacagcagcgtctgtcaaagcaggcaaacgacaacaacaacagcaactttccctggactgcggctacaaagtatcatctaaatggtcgggactcgttggttaatccaggaccagctatggccagccacaaagacgatgaagaaaagtttttccccatgcatggaaccctgatatttggtaaacaaggaacaaatgctaacgacgcggatttggaacatgtcatgattacagatgaagaagaaatcaggaccaccaatcccgtggctacagagcagtacggaaacgtgtcaaataatttgcaaaactcaaatactggtccaactacagaaaatgtcaatcaccagggagcgttacctggtatggtgtggcaggatcgagacgtgtacctgcagggacccatttgggccaagattcctcacaccgacggacactttcacccttctccactgatgggaggttttggactcaaacacccgcctcctcaaatcatgatcaaaaacactcctgttccagccaatcctcctacaaacttcagcgcggcaaagtttgcttccttcatcacacagtattccacgggacaggtcagcgtggagatcgagtgggagctgcagaaggagaacagcaaacgctggaaccccgagatccagtacacttccaactacaacaaatctgttaatgtggactttactgtggacactaatggtgtgtattcagagcctcgccccattggcaccagatacctgactcgtaatctgtaa

SEQ ID NO: 2188 - DNA, 2208 bp, Artificial Sequence
  Synthetic Polynucleotide
atggctgccgatggttatcttccagattggctcgaggacactctctctgaaggaataagacagtggtggaagctcaaacctggcccaccaccaccaaagcccgcagagcggcatcaggacgacagcaggggtcttgtgcttcctgggtacaagtacctcggacccttcaacggactcgacaaaggagagccggtcaacgaggcagacgctgcggccctcgagcacgacaaggcctacgaccggcagctcgacagcggagacaacccgtacctcaagtacaaccacgccgacgcggagtttcaggagcgtcttaaagaagatacgtcttttgggggcaacctcggacgagcagtcttccaggcgaaaaagagggttcttgaacctctgggcctggttgaggaacctgttaagacggctccgggaaaaaagaggccggtagagcactctcctgcggagccagactcctcctcgggaaccggaaaagcgggccagcagcctgcaagaaagagattgaatttcggtcagactggagacgcaggctccgtacctgacccccagcctctcggacagccaccagcagcccccacaagtttgggatctactacaatggctacaggcagtggcgcaccaatggcagacaataacgagggtgccgatggagtgggtaattcctcaggaaattggcattgcgattcccaatggctgggcgacagagtcatcaccaccagcacccgaacctgggccctgcccacctacaacaaccacctctacaagcaaatctccagccaatcaggagcatcgaacgacaaccactactttggctacagcaccccttgggggtattttgacttcaacagattccactgtcacttctccccacgtgactggcaaagactcatcaacaacaactggggattccgacccaagagactcaacttcaagctctttaacattcaagtcaaagaggtcacgcagaatgacggtacgacgacgattgccaataaccttaccagcacggttcaggtgtttactgactcggagtaccagctcccgtacgtcctcggctcggcgcatcaaggatgcctcccgccgtttccagcggacgtcttcatggtcccacagtatggatacctcaccctgaacaacgggagtcaggcggtaggacgctcttccttttactgcctggagtactttccttctcagatgctgcgtaccggaaacaactttaccttcagctacacctttgaggacgtgcctttccacagcagctacgctcacagccagagtttggaccggctgatgaatcctctgatcgaccagtatctgtattatctgaacaggacacaatcaaatagtggaactcttcagcagtctaggctactgtttagccaagctggacccaccagcatgtctcttcaagctaaaaactggctgcctggaccttgctacagacagcagcgtctgtcaaagcaggcaaacgacaacaacaacagcaactttccctggactgcggctacaaagtatcatctaaatggtcgggactcgttggttaatccaggaccagctatggccagccacaaagacgatgaagaaaagtttttccccatgcatggaaccctgatatttggtaaacaaggaacaaatgctaacgacgcggatttggaacatgtcatgattacagatgaagaagaaatcaggaccaccaatcccgtggctacagagcagtacggaaacgtgtcaaataatttgcaaaactcaaatactggtccaactacagaaaatgtcaatcaccagggagcgttacctggtatggtgtggcaggatcgagacgtgtacctgcagggacccatttgggccaagattcctcacaccgacggacactttcacccttctccactgatgggaggttttggactcaaacacccgcctcctcaaatcatgatcaaaaacactcctgttccagccaatcctcctacaaacttcagcgcggcaaagtttgcttccttcatcacacagtattccacgggacaggtcagcgtggagatcgagtgggagctgcagaaggagaacagcaaacgctggaaccccgagatccagtacacttccaactacaacaaatctgttaatgtggactttactgtggacactaatggtgtgtattcagagcctcgccccattggcaccagatacctgactcgtaatctgtaa

SEQ ID NO: 2189 - DNA, 2208 bp, Artificial Sequence
  Synthetic Polynucleotide
atggctgccgatggttatcttccagattggctcgaggacactctctctgaaggaataagacagtggtggaagctcaaacctggcccaccaccaccaaagcccgcagagcggcatcaggacgacagcaggggtcttgtgcttcctgggtacaagtacctcggacccttcaacggactcgacaaaggagagccggtcaacgaggcagacgctgcggccctcgagcacgacaaggcctacgaccggcagctcgacagcggagacagcccgtacctcaagtacaaccacgccgacgcggagtttcaggagcgtcttaaagaagatacgtcttttgggggcaacctcggacgagcagtcttccaggcgaaaaagagggttcttgaacctctgggcctggttgaggaacctgttaagacggctccgggaaaaaagaggccggtagagcactctcctgcggagccagactcctcctcgggaaccggaaaagcgggccagcagcctgcaagaaagagattgaatttcggtcagactggagacgcagactccgtacctgacccccagcctctcggacagccaccagcagcccccacaagtttgggatctactacaatggctacaggcagtggcgcaccaatggcagacaataacgagggtgccgatggagtgggtaattcctcaggaaattggcattgcgattcccaatggctgggcgacagagtcatcaccaccagcacccgaacctgggccctgcccacctacaacaaccacctctacaagcaaatctccagccaatcaggagcatcgaacgacaaccactactttggctacagcaccccttgggggtattttgacttcaacagattccactgtcacttctccccacgtgactggcaaagactcatcaacaacaactggggattccgacccaagagactcaacttcaagctctttaacattcaagtcaaagaggtcacgcagaatgacggtacgacgacgattgccaataaccttaccagcacggttcaggtgtttactgactcggagtaccagctcccgtacgtcctcggctcggcgcatcaaggatgcctcccgccgtttccagcggacgtcttcatggtcccacagtatggatacctcaccctgaacaacgggagtcaggcggtaggacgctcttccttttactgcctggagtactttccttctcagatgctgcgtaccggaaacaactttaccttcagctacacctttgaggacgtgcctttccacagcagctacgctcacagccagagtttggaccggctgatgaatcctctgatcgaccagtatctgtattatctgaacaggacacaatcaaatagtggaactcttcagcagtctaggctactgtttagccaagctggacccaccagcatgtctcttcaagctaaaaactggctgcctggaccttgctacagacagcagcgtctgtcaaagcaggcaaacgacaacaacaacagcaactttccctggactgcggctacaaagtatcatctaaatggtcgggactcgttggttaatccaggaccagctatggccagccacaaagacgatgaagaaaagtttttccccatgcatggaaccctgatatttggtaaacaaggaacaaatgctaacgacgcggatttggaacatgtcatgattacagatgaagaagaaatcaggaccaccaatcccgtggctacagagcagtacggaaacgtgtcaaataatttgcaaaactcaaatactggtccaactacagaaaatgtcaatcaccagggagcgttacctggtatggtgtggcaggatcgagacgtgtacctgcagggacccatttgggccaagattcctcacaccgacggacactttcacccttctccactgatgggaggttttggactcaaacacccgcctcctcaaatcatgatcaaaaacactcctgttccagccaatcctcctacaaacttcagcgcggcaaagtttgcttccttcatcacacagtattccacgggacaggtcagcgtggagatcgagtgggagctgcagaaggagaacagcaaacgctggaaccccgagatccagtacacttccaactacaacaaatctgttaatgtggactttactgtggacactaatggtgtgtattcagagcctcgccccattggcaccagatacctgactcgtaatctgtaa

SEQ ID NO: 2190 - DNA, 2208 bp, Artificial Sequence
  Synthetic Polynucleotide
atggctgccgatggttatcttccagattggctcgaggacactctctctgaaggaataagacagtggtggaagctcaaacctggcccaccaccaccaaagcccgcagagcggcatcaggacgacagcaggggtcttgtgcttcctgggtacaagtacctcggacccttcaacggactcgacaaaggagagccggtcaacgaggcagacgctgcggccctcgagcacgacaaggcctacgaccggcagctcgacagcggagacaacccgtacctcaagtacaaccacgccgacgcggagtttcaggagcgtcttaaagaagatacgtcttttgggggcaacctcggacgagcagtcttccaggcgaaaaagagggttcttgaacctctgggcctggttgaggaacctgttaagacggctccgggaaaaaagaggccggtagagcactctcctgcggagccagactcctcctcgggaaccggaaaagcgggccagcagcctgcaagaaagagattgaatttcggtcagactggagacgcagactccgtacctgacccccagcctctcggacagccaccagcagcccccacaagtttgggatctactacaatggctacaggcagtggcgcaccaatggcagacaataacgagggtgccgatggagtgggtaattcctcaggaaattggcattgcgattcccaatggctgggcgacagagtcatcaccaccagcacccgaacctgggccctgcccacctacaacaaccacctctacaagcaaatctccagccaatcaggagcatcgaacgacaaccactactttggctacagcaccccttgggggtattttgacttcaacagattccactgtcacttctccccacgtgactggcaaagactcatcaacaacaactggggattccgacccaagagactcaacttcaagctctttaacattcaagtcaaagaggtcacgcagaatgacggtacgacgacgattgccaataaccttaccagcacggttcaggtgtttactgactcggagtaccagctcccgtacgtcctcggctcggcgcatcaaggatgcctcccgccgtttccagcggacgtcttcatggtcccacagtatggatacctcaccctgaacaacgggagtcaggcggtaggacgctcttccttttactgcctggagtactttccttctcagatgctgcgtaccggaaacaactttaccttcagctacacctttgaggacgtgcctttccacagcagctacgctcacagccagagtttggaccggctgatgaatcctctgatcgaccagtatctgtattatctgaacaggacacaatcaaatagtggaactcttcagcagtctaggctactgtttagccaagctggacccaccagcatgtctcttcaagctaaaaactggctgcctggaccttgctacagacagcagcgtctgtcaaagcaggcaaacgacaacaacaacagcaactttccctggactgcggctacaaagtatcatctaaatggtcgggactcgttggttaatccaggaccagctatggccagccacaaagacgatgaagaaaagtttttccccatgcatggaaccctgatatttggtaaacaaggaacaaatgctaacgacgcggatttggaacatgtcatgattacagatgaagaagaaatcaggaccaccaatcccgtggctacagagcagtacggaaacgtgtcaaataatttgcaaaactcaaatactggtccaactacagaaaatgtcaatcaccagggagcgttacctggtatggtgtggcaggatcgagacgtgtacctgcagggacccatttgggccaagattcctcacaccgacggacactttcacccttctccactgatgggaggttttggactcaaacacccgcctcctcaaatcatgatcaaaaacactcctgttccagccaatcctcctacaaacttcagcgcggcaaagtttgcttccttcatcacacagtattccacgggacaggtcagcgtggagatcgagtgggagctgcagaaggagaacagcaaacgctggaaccccgagatccagtacacttccaactacaacaaatctgttaatgtggactttactgtggacactaatggtgtgtattcagagcctcgccccattggcaccagatacctgactcgtaatccgtaa

SEQ ID NO: 2191 - DNA, 2208 bp, Artificial Sequence
  Synthetic Polynucleotide
atggctgccgatggttatcttccagattggctcgaggacactctctctgaaggaataagacagtggtggaagctcaaacctggcccaccaccaccaaagcccgcagagcggcatcaggacgacagcaggggtcttgtgcttcctgggtacaagtacctcggacccttcaacggactcgacaaaggagagccggtcaacgaggcagacgctgcggccctcgagcacgacaaggcctacgaccggcagctcgacagcggagacaacccgtacctcaagtacaaccacgccgacgcggagtttcaggagcgtcttaaagaagatacgtcttttgggggcaacctcggacgagcagtcttccaggcgaaaaagagggttcttgaacctctgggcctggttgaggaacctgttaagacggctccgggaaaaaagaggccggtagagcactctcctgcggagccagactcctcctcgggaaccggaaaagcgggccagcagcctgcaagaaagagattgaatttcggtcagactggagacgcagactccgtacctgacccccagcctctcggacagccaccagcagcccccacaagtttgggatctactacaatggctacaggcagtggcgcaccaatggcagacaataacgagggtgccgatggagtgggtaattcctcaggaaattggcattgcgattcccaatggctgggcgacagagtcatcaccaccagcacccgaacctgggccctgcccacctacaacaaccacctctacaagcaaatctccagccaatcaggagcatcgaacgacaaccactactttggctacagcaccccttgggggtattttgacttcaacagattccactgtcacttctccccacgtgactggcaaagactcatcaacaacaactggggattccgacccaagagactcaacttcaagctctttaacattcaagtcaaagaggtcacgcagaatgacggtacgacgacgattgccaataaccttaccagcacggttcaggtgtttactgactcggagtaccagctcccgtacgtcctcggctcggcgcatcaaggatgcctcccgccgtttccagcggacgtcttcatggtcccacagtatggatacctcaccctgaacaacgggagtcaggcggtaggacgctcttccttttactgcctggagtactttccttctcagatgctgcgtaccggaaacaactttaccttcagctacacctttgaggacgtgcctttccacagcagctacgctcacagccagagtttggaccggctgatgaatcctctgatcgaccagtatctgtattatctgaacaggacacaatcaaatagtggaactcttcagcagtctaggctactgtttagccaagctggacccaccagcatgtctcttcaagctaaaaactggctgcctggaccttgctacagacagcagcgtccgtcaaagcaggcaaacgacaacaacaacagcaactttccctggactgcggctacaaagtatcatctaaatggtcgggactcgttggttaatccaggaccagctatggccagccacaaagacgatgaagaaaagtttttccccatgcatggaaccctgatatttggtaaacaaggaacaaatgctaacgacgcggatttggaacatgtcatgattacagatgaagaagaaatcaggaccaccaatcccgtggctacagagcagtacggaaacgtgtcaaataatttgcaaaactcaaatactggtccaactacagaaaatgtcaatcaccagggagcgttacctggtatggtgtggcaggatcgagacgtgtacctgcagggacccatttgggccaagattcctcacaccgacggacactttcacccttctccactgatgggaggttttggactcaaacacccgcctcctcaaatcatgatcaaaaacactcctgttccagccaatcctcctacaaacttcagcgcggcaaagtttgcttccttcatcacacagtattccacgggacaggtcagcgtggagatcgagtgggagctgcagaaggagaacagcaaacgctggaaccccgagatccagtacacttccaactacaacaaatctgttaatgtggactttactgtggacactaatggtgtgtattcagagcctcgccccattggcaccagatacctgactcgtaatctgtaa

SEQ ID NO: 2192 - DNA, 2208 bp, Artificial Sequence
  Synthetic Polynucleotide
atggctgccgatggttatcttccagattggctcgaggacactctctctgaaggaataagacagtggtggaagctcaaacctggcccaccaccaccaaagcccgcagagcggcatcaggacgacagcaggggtcttgtgcttcctgggtacaagtacctcggacccttcaacggactcgacaaaggagagccggtcaacgaggcagacgctgcggccctcgagcacgacaaggcctacgaccggcagctcgacagcggagacaacccgtacctcaagtacaaccacgccgacgcggagtttcaggagcgtcttaaagaagatacgtcttttgggggcaacctcggacgagcagtcttccaggcgaaaaagagggttcttgaacctctgggcctggttgaggaacctgttaagacggctccgggaaaaaagaggccggtagagcactctcctgcggagccagactcctcctcgggaaccggaaaagcgggccagcagcctgcaagaaagagattgaatttcagtcagactggagacgcagactccgtacctgacccccagcctctcggacagccaccagcagcccccacaagtttgggatctactacaatggctacaggcagtggcgcaccaatggcagacaataacgagggtgccgatggagtgggtaattcctcaggaaattggcattgcgattcccaatggctgggcgacagagtcatcaccaccagcacccgaacctgggccctgcccacctacaacaaccacctctacaagcaaatctccagccaatcaggagcatcgaacgacaaccactactttggctacagcaccccttgggggtattttgacttcaacagattccactgtcacttctccccacgtgactggcaaagactcatcaacaacaactggggattccgacccaagagactcaacttcaagctctttaacattcaagtcaaagaggtcacgcagaatgacggtacgacgacgattgccaataaccttaccagcacggttcaggtgtttactgactcggagtaccagctcccgtacgtcctcggctcggcgcatcaaggatgcctcccgccgtttccagcggacgtcttcatggtcccacagtatggatacctcaccctgaacaacgggagtcaggcggtaggacgctcttccttttactgcctggagtactttccttctcagatgctgcgtaccggaaacaactttaccttcagctacacctttgaggacgtgcctttccacagcagctacgctcacagccagagtttggaccggctgatgaatcctctgatcgaccagtatctgtattatctgaacaggacacaatcaaatagtggaactcttcagcagtctaggctactgtttagccaagctggacccaccagcatgtctcttcaagctaaaaactggctgcctggaccttgctacagacagcagcgtctgtcaaagcaggcaaacgacaacaacaacagcaactttccctggactgcggctacaaagtatcatctaaatggtcgggactcgttggttaatccaggaccagctatggccagccacaaagacgatgaagaaaagtttttccccatgcatggaaccctgatatttggtaaacaaggaacaaatgctaacgacgcggatttggaacatgtcatgattacagatgaagaagaaatcaggaccaccaatcccgtggctacagagcagtacggaaacgtgtcaaataatttgcaaaactcaaatactggtccaactacagaaaatgtcaatcaccagggagcgttacctggtatggtgtggcaggatcgagacgtgtacctgcagggacccatttgggccaagattcctcacaccgacggacactttcacccttctccactgatgggaggttttggactcaaacacccgcctcctcaaatcatgatcaaaaacactcctgttccagccaatcctcctacaaacttcagcgcggcaaagtttgcttccttcatcacacagtattccacgggacaggtcagcgtggagatcgagtgggagctgcagaaggagaacagcaaacgctggaaccccgagatccagtacacttccaactacaacaaatctgttaatgtggactttactgtggacactaatggtgtgtattcagagcctcgccccattggcaccagatacctgactcgtaatctgtaa

SEQ ID NO: 2193 - DNA, 2208 bp, Artificial Sequence
  Synthetic Polynucleotide
atggctgccgatggttatcttccagattggctcgaggacactctctctgaaggaataagacagtggtggaagctcaaacctggcccaccaccaccaaagcccgcagagcggcatcaggacgacagcaggggtcttgtgcttcctgggtacaagtacctcggacccttcaacggactcgacaaaggagagccggtcaacgaggcagacgctgcggccctcgagcacgacaaggcctacgaccggcagctcgacagcggagacaacccgtacctcaagtacaaccacgccgacgcggagtttcaggagcgtcttaaagaagatacgtcttttgggggcaacctcggacgagcagtcttccaggcgaaaaagagggttcttgaacctctgggcctggttgaggaacctgttaagacggctccgggaaaaaagaggccggtagagcactctcctgcggagccagactcctcctcgggaaccggaaaagcgggccagcagcctgcaagaaagagattgaatttcggtcagactggagacgcagactccgtacctgacccccagcctctcggacagccaccagcagcccccacaagtttgggatctactacaatggctacaggcagtggcgcaccaatggcagacaataacgagggtgccgatggagtgggtaattcctcaggaaattggcattgcgattcccaatggctgggcgacagagtcatcaccaccagcacccgaacctgggccctgcccacctacaacaaccacctctacaagcaaatctccagccaatcaggagcatcgaacgacaaccactactttggctacagcaccccttgggggtattttgacttcaacagattccactgtcacttctccccacgtgactggcaaagactcatcaacaacaactggggattccgacccaagagactcaacttcaagctctttaacattcaagtcaaagaggtcacgcagaatgacggtacgacgacgattgccaataaccttaccagcacggttcaggtgtttactgactcggagtaccagctcccgtacgtcctcggctcggcgcatcaaggatgcctcccgccgtttccagcggacgtcttcatggtcccacagtatggatacctcaccctgaacaacgggagtcaggcggtaggacgctcttccttttactgcctggagtactttccttctcagatgctgcgtaccggaaacaactttaccttcagctacacctttgaggacgtgcctttccacagcagctacgctcacagccagagtttggaccggctgatgaatcctctgatcgaccagtatctgtattatctgaacaggacacaatcaaatagtggaactcttcagcagtctaggctactgtttagccaagctggacccaccagcatgtctcttcaagctaaaaactggctgcctggaccttgctacagacagcagcgtctgtcaaagcaggcaaacgacaacaacaacagcaactttccctggactgcggctacaaagtatcatctaaatggtcgggactcgttggttaatccaggaccagctatggccagccacaaagacgatgaagaaaagtttttccccatgcatggaaccctgatatttggtaaacaaggaacaaatgctaacgacgcggatttggaacatgtcatgattacagatgaagaagaaatcaggaccaccaatcccgtggctacagagcagtacggaaacgtgtcaaataatttgcaaaactcaaatactggtccaactacagaaaatgtcaatcaccagggagcgttacctggtatggtgtggcaggatcgagacgtgtacctgcagggacccatttgggccaagattcctcacaccgacggacactttcacccttctccactgatgggaggttttggactcaaacacccgcctcctcaaatcatgatcaaaaacactcctgttccagccaatcctcctacaaacttcagcgcggcaaagtttgcttccttcatcacacagtattccacgggacaggtcagcgtggagatcgagtgggagccgcagaaggagaacagcaaacgctggaaccccgagatccagtacacttccaactacaacaaatctgttaatgtggactttactgtggacactaatggtgtgtattcagagcctcgccccattggcaccagatacctgactcgtaatctgtaa

SEQ ID NO: 2194 - DNA, 2208 bp, Artificial Sequence
  Synthetic Polynucleotide
atggctgccgatggttatcttccagattggctcgaggacactctctctgaaggaataagacagtggtggaagctcaaacctggcccaccaccaccaaagcccgcagagcggcatcaggacgacagcaggggtcttgtgcttcctgggtacaagtacctcggacccttcaacggactcgacaaaggagagccggtcaacgaggcagacgctgcggccctcgagcacgacaaggcctacgaccggcagctcgacagcggagacaacccgtacctcaagtacaaccacgccgacgcggagtttcaggagcgtcttaaagaagatacgtcttttgggggcaacctcggacgagcagtcttccaggcgaaaaagagggttcttgaacctctgggcctggttgaggaacctgttaagacggctccgggaaaaaagaggccggtagagcactctcctgcggagccagactcctcctcgggaaccggaaaagcgggccagcagcctgcaagaaagagattgaatttcggtcagactggagacgcagactccgtacctgacccccagcctctcggacagccaccagcagcccccacaagtttgggatctactacaatggctacaggcagtggcgcaccaatggcagacaataacgagggtgccgatggagtgggtaattcctcaggaaattggcattgcgattcccaatggctgggcgacagagtcatcaccaccagcacccgaacctgggccctgcccacctacaacaaccacctctacaagcaaatctccagccaatcaggagcatcgaacgacaaccactactttggctacagcaccccttgggggtattttgacttcaacagattccactgtcacttctccccacgtgactggcaaagactcatcaacaacaactggggattccgacccaagagacccaacttcaagctctttaacattcaagtcaaagaggtcacgcagaatgacggtacgacgacgattgccaataaccttaccagcacggttcaggtgtttactgactcggagtaccagctcccgtacgtcctcggctcggcgcatcaaggatgcctcccgccgtttccagcggacgtcttcatggtcccacagtatggatacctcaccctgaacaacgggagtcaggcggtaggacgctcttccttttactgcctggagtactttccttctcagatgctgcgtaccggaaacaactttaccttcagctacacctttgaggacgtgcctttccacagcagctacgctcacagccagagtttggaccggctgatgaatcctctgatcgaccagtatctgtattatctgaacaggacacaatcaaatagtggaactcttcagcagtctaggctactgtttagccaagctggacccaccagcatgtctcttcaagctaaaaactggctgcctggaccttgctacagacagcagcgtctgtcaaagcaggcaaacgacaacaacaacagcaactttccctggactgcggctacaaagtatcatctaaatggtcgggactcgttggttaatccaggaccagctatggccagccacaaagacgatgaagaaaagtttttccccatgcatggaaccctgatatttggtaaacaaggaacaaatgctaacgacgcggatttggaacatgtcatgattacagatgaagaagaaatcaggaccaccaatcccgtggctacagagcagtacggaaacgtgtcaaataatttgcaaaactcaaatactggtccaactacagaaaatgtcaatcaccagggagcgttacctggtatggtgtggcaggatcgagacgtgtacctgcagggacccatttgggccaagattcctcacaccgacggacactttcacccttctccactgatgggaggttttggactcaaacacccgcctcctcaaatcatgatcaaaaacactcctgttccagccaatcctcctacaaacttcagcgcggcaaagtttgcttccttcatcacacagtattccacgggacaggtcagcgtggagatcgagtgggagctgcagaaggagaacagcaaacgctggaaccccgagatccagtacacttccaactacaacaaatctgttaatgtggactttactgtggacactaatggtgtgtattcagagcctcgccccattggcaccagatacctgactcgtaatctgtaa

SEQ ID NO: 2195 - DNA, 2208 bp, Artificial Sequence
  Synthetic Polynucleotide
atggctgccgatggttatcttccagattggctcgaggacactctctctgaaggaataagacagtggtggaagctcaaacctggcccaccaccaccaaagcccgcagagcggcatcaggacgacagcaggggtcttgtgcttcctgggtacaagtacctcggacccttcaacggactcgacaaaggagagccggtcaacgaggcagacgctgcggccctcgagcacgacaaggcctacgaccggcagctcgacagcggagacaacccgtacctcaagtacaaccacgccgacgcggagtttcaggagcgtcttaaagaagatacgtcttttgggggcaacctcggacgagcagtcttccaggcgaaaaagagggttcttgaacctctgggcctggttgaggaacctgttaagacggctccgggaaaaaagaggccggtagagcactctcctgcggagccagactcctcctcgggaaccggaaaagcgggccagcagcctgcaagaaagagattgaatttcggtcagactggagacgcagactccgtacctgacccccagcctctcggacagccaccagcagcccccacaagtttgggatctactacaatggctacaggcagtggcgcaccaatggcagacaataacgagggtgccgatggagtgggtaattcctcaggaaattggcattgcgattcccaatggctgggcgacagagtcatcaccaccagcacccgaacctgggccctgcccacctacaacaaccacctctacaagcaaatctccagccaatcaggagcatcgaacgacaaccactactttggctacagcaccccttgggggtattttgacttcaacagattccactgtcacttctccccacgtgactggcaaagactcatcaacaacaactggggattccgacccaagagactcaacttcaagctctttaacattcaagtcaaagaggtcacgcagaatgacggtacgacgacgattgccaataaccttaccagcacggttcaggtgtttactgactcggagtaccagctcccgtacgtcctcggctcggcgcatcaaggatgcctcccgccgtttccagcggacgtcttcatggtcccacagtatggatacctcaccctgaacaacgggagtcaggcggtaggacgctcttccttttactgcctggagtactttccttctcagatgctgcgtaccggaaacaactttaccttcagctacacctttgaggacgtgcctttccacagcagctacgctcacagccagagtttggaccggctgatgaatcctctgatcgaccagtatctgtattatctgaacaggacacaatcaaatagtggaactcttcagcagtctaggctactgtttagccaagctggacccaccagcatgtctcttcaagctaaaaactggctgcctggaccttgctacagacagcagcgtctgtcaaagcaggcaaacgacaacaacaacagcaactttccctggactgcggctacaaagtatcatctaaatggtcgggactcgttggttaatccaggaccagctatggccagccacaaagacgatgaagaaaagtttttccccatgcatggaaccctgatatttggtaaacaaggaacaaatgctaacgacgcggatttggaacatgtcgtgattacagatgaagaagaaatcaggaccaccaatcccgtggctacagagcagtacggaaacgtgtcaaataatttgcaaaactcaaatactggtccaactacagaaaatgtcaatcaccagggagcgttacctggtatggtgtggcaggatcgagacgtgtacctgcagggacccatttgggccaagattcctcacaccgacggacactttcacccttctccactgatgggaggttttggactcaaacacccgcctcctcaaatcatgatcaaaaacactcctgttccagccaatcctcctacaaacttcagcgcggcaaagtttgcttccttcatcacacagtattccacgggacaggtcagcgtggagatcgagtgggagctgcagaaggagaacagcaaacgctggaaccccgagatccagtacacttccaactacaacaaatctgttaatgtggactttactgtggacactaatggtgtgtattcagagcctcgccccattggcaccagatacctgactcgtaatctgtaa

SEQ ID NO: 2196 - DNA, 2208 bp, Artificial Sequence
  Synthetic Polynucleotide
atggctgccgatggttatcttccagattggctcgaggacactctctctgaaggaataagacagtggtggaagctcaaacctggcccaccaccaccaaagcccgcagagcggcatcaggacgacagcaggggtcttgtgcttcctgggtacaagtacctcggacccttcaacggactcgacaaaggagagccggtcaacgaggcagacgctgcggccctcgagcacgacaaggcctacgaccggcagctcgacagcggagacaacccgtacctcaagtacaaccacgccgacgcggagtttcaggagcgtcttaaagaagatacgtcttttgggggcaacctcggacgagcagtcttccaggcgaaaaagagggttcttgaacctctgggcctggttgaggaacctgttaagacggctccgggaaaaaagaggccggtagagcactctcctgcggagccagactcctcctcgggaaccggaaaagcgggccagcagcctgcaagaaagagattgaatttcggtcagactggagacgcagactccgtacctgacccccagcctctcggacagccaccagcagcccccacaagtttgggatctactacaatggctacaggcagtggcgcaccaatggcagacaataacgagggtgccgatggagtgggtaattcctcaggaaattggcattgcgattcccaatggctgggcgacagagtcatcaccaccagcacccgaacctgggccctgcccacctacaacaaccacctctacaagcaaatctccagccaatcaggagcatcgaacgacaaccactactttggctacagcaccccttgggggtattttgacttcaacagattccactgtcacttctccccacgtgactggcaaagactcatcaacaacaactggggattccgacccaagagactcaacttcaagctctttaacattcaagtcaaagaggtcacgcagaatgacggtacgacgacgattgccaataaccttaccagcacggttcaggtgtttactgactcggagtaccagctcccgtacgtcctcggctcggcgcatcaaggatgcctcccgccgtttccagcggacgtcttcatggtcccacagtatggatacctcaccctgaacaacgggagtcaggcggtaggacgctcttccttttactgcctggagtactttccttctcagatgctgcgtaccggaaacaactttaccttcagctacacctttgaggacgtgcctttccacagcagctacgctcacagccagagtttggaccggctgatgaatcctctgatcgaccagtatctgtattatctgaacaggacacaatcaaatagtggaactcttcagcagtctaggctactgtttagccaagctggacccaccagcatgtctcttcaagctaaaaactggctgcctggaccttgctacagacagcagcgtctgtcaaagcaggcaaacgacaacaacaacagcaactttccctggactgcggctacaaagtatcatctaaatggtcgggactcgttggttaatccaggaccagctatggccagccacaaagacgatgaagaaaagtttttccccatgcatggaaccctgatatttggtaaacaaggaacaaatgctaacgacgcggatttggaacatgtcatgattacagatgaagaagaaatcaggaccaccaatcccgtggctacagagcagtacggaaacgtgtcaaataatttgcaaaactcaaatactggtccaactacagaaaatgtcaatcaccagggagcgttacctggtatggtgtggcgggatcgagacgtgtacctgcagggacccatttgggccaagattcctcacaccgacggacactttcacccttctccactgatgggaggttttggactcaaacacccgcctcctcaaatcatgatcaaaaacactcctgttccagccaatcctcctacaaacttcagcgcggcaaagtttgcttccttcatcacacagtattccacgggacaggtcagcgtggagatcgagtgggagctgcagaaggagaacagcaaacgctggaaccccgagatccagtacacttccaactacaacaaatctgttaatgtggactttactgtggacactaatggtgtgtattcagagcctcgccccattggcaccagatacctgactcgtaatctgtaa

SEQ ID NO: 2197 - DNA, 2208 bp, Artificial Sequence
  Synthetic Polynucleotide
atggctgccgatggttatcttccagattggctcgaggacactctctctgaaggaataagacagtggtggaagctcaaacctggcccaccaccaccaaagcccgcagagcggcatcaggacgacagcaggggtcttgtgcttcctgggtacaagtacctcggacccttcaacggactcgacaaaggagagccggtcaacgaggcagacgctgcggccctcgagcacgacaaggcctacgaccggcagctcgacagcggagacaacccgtacctcaagtacaaccacgccgacgcggagtttcaggagcgtcttaaagaagatacgtcttttgggggcaacctcggacgagcagtcttccaggcgaaaaagagggttcttgaacctctgggcctggttgaggaacctgttaagacggctccgggaaaaaagaggccggtagagcactctcctgcggagccagactcctcctcgggaaccggaaaagcgggccagcagcctgcaagaaagagattgaatttcggtcagactggaggcgcagactccgtacctgacccccagcctctcggacagccaccagcagcccccacaagtttgggatctactacaatggctacaggcagtggcgcaccaatggcagacaataacgagggtgccgatggagtgggtaattcctcaggaaattggcattgcgattcccaatggctgggcgacagagtcatcaccaccagcacccgaacctgggccctgcccacctacaacaaccacctctacaagcaaatctccagccaatcaggagcatcgaacgacaaccactactttggctacagcaccccttgggggtattttgacttcaacagattccactgtcacttctccccacgtgactggcaaagactcatcaacaacaactggggattccgacccaagagactcaacttcaagctctttaacattcaagtcaaagaggtcacgcagaatgacggtacgacgacgattgccaataaccttaccagcacggttcaggtgtttactgactcggagtaccagctcccgtacgtcctcggctcggcgcatcaaggatgcctcccgccgtttccagcggacgtcttcatggtcccacagtatggatacctcaccctgaacaacgggagtcaggcggtaggacgctcttccttttactgcctggagtactttccttctcagatgctgcgtaccggaaacaactttaccttcagctacacctttgaggacgtgcctttccacagcagctacgctcacagccagagtttggaccggctgatgaatcctctgatcgaccagtatctgtattatctgaacaggacacaatcaaatagtggaactcttcagcagtctaggctactgtttagccaagctggacccaccagcatgtctcttcaagctaaaaactggctgcctggaccttgctacagacagcagcgtctgtcaaagcaggcaaacgacaacaacaacagcaactttccctggactgcggctacaaagtatcatctaaatggtcgggactcgttggttaatccaggaccagctatggccagccacaaagacgatgaagaaaagtttttccccatgcatggaaccctgatatttggtaaacaaggaacaaatgctaacgacgcggatttggaacatgtcatgattacagatgaagaagaaatcaggaccaccaatcccgtggctacagagcagtacggaaacgtgtcaaataatttgcaaaactcaaatactggtccaactacagaaaatgtcaatcaccagggagcgttacctggtatggtgtggcaggatcgagacgtgtacctgcagggacccatttgggccaagattcctcacaccgacggacactttcacccttctccactgatgggaggttttggactcaaacacccgcctcctcaaatcatgatcaaaaacactcctgttccagccaatcctcctacaaacttcagcgcggcaaagtttgcttccttcatcacacagtattccacgggacaggtcagcgtggagatcgagtgggagctgcagaaggagaacagcaaacgctggaaccccgagatccagtacacttccaactacaacaaatctgttaatgtggactttactgtggacactaatggtgtgtattcagagcctcgccccattggcaccagatacctgactcgtaatctgtaa

SEQ ID NO: 2198 - DNA, 2208 bp, Artificial Sequence
  Synthetic Polynucleotide
atggctgccgatggttatcttccagattggctcgaggacactctctctgaaggaataagacagtggtggaagctcaaacctggcccaccaccaccaaagcccgcagagcggcatcaggacgacagcaggggtcttgtgcttcctgggtacaagtacctcggacccttcaacggactcgacaaaggagagccggtcaacgaggcagacgctgcggccctcgagcacgacaaggcctacgaccggcagctcgacagcggagacaacccgtacctcaagtacaaccacgccgacgcggagtttcaggagcgtcttaaagaagatacgtcttttgggggcaacctcggacgagcagtcttccaggcgaaaaagagggttcttgaacctctgggcctggttgaggaacctgttaagacggctccgggaaaaaagaggccggtagagcactctcctgcggagccagactcctcctcgggaaccggaaaagcgggccagcagcctgcaagaaagagattgaatttcggtcagactggagacgcagactccgtacctgacccccagcctctcggacagccaccagcagcccccacaagtttgggatctactacaatggctacaggcagtggcgcaccaatggcagacaataacgagggtaccgatggagtgggtaattcctcaggaaattggcattgcgattcccaatggctgggcgacagagtcatcaccaccagcacccgaacctgggccctgcccacctacaacaaccacctctacaagcaaatctccagccaatcaggagcatcgaacgacaaccactactttggctacagcaccccttgggggtattttgacttcaacagattccactgtcacttctccccacgtgactggcaaagactcatcaacaacaactggggattccgacccaagagactcaacttcaagctctttaacattcaagtcaaagaggtcacgcagaatgacggtacgacgacgattgccaataaccttaccagcacggttcaggtgtttactgactcggagtaccagctcccgtacgtcctcggctcggcgcatcaaggatgcctcccgccgtttccagcggacgtcttcatggtcccacagtatggatacctcaccctgaacaacgggagtcaggcggtaggacgctcttccttttactgcctggagtactttccttctcagatgctgcgtaccggaaacaactttaccttcagctacacctttgaggacgtgcctttccacagcagctacgctcacagccagagtttggaccggctgatgaatcctctgatcgaccagtatctgtattatctgaacaggacacaatcaaatagtggaactcttcagcagtctaggctactgtttagccaagctggacccaccagcatgtctcttcaagctaaaaactggctgcctggaccttgctacagacagcagcgtctgtcaaagcaggcaaacgacaacaacaacagcaactttccctggactgcggctacaaagtatcatctaaatggtcgggactcgttggttaatccaggaccagctatggccagccacaaagacgatgaagaaaagtttttccccatgcatggaaccctgatatttggtaaacaaggaacaaatgctaacgacgcggatttggaacatgtcatgattacagatgaagaagaaatcaggaccaccaatcccgtggctacagagcagtacggaaacgtgtcaaataatttgcaaaactcaaatactggtccaactacagaaaatgtcaatcaccagggagcgttacctggtatggtgtggcaggatcgagacgtgtacctgcagggacccatttgggccaagattcctcacaccgacggacactttcacccttctccactgatgggaggttttggactcaaacacccgcctcctcaaatcatgatcaaaaacactcctgttccagccaatcctcctacaaacttcagcgcggcaaagtttgcttccttcatcacacagtattccacgggacaggtcagcgtggagatcgagtgggagctgcagaaggagaacagcaaacgctggaaccccgagatccagtacacttccaactacaacaaatctgttaatgtggactttactgtggacactaatggtgtgtattcagagcctcgccccattggcaccagatacctgactcgtaatctgtaa

SEQ ID NO: 2199 - DNA, 2208 bp, Artificial Sequence
  Synthetic Polynucleotide
atggctgccgatggttatcttccagattggctcgaggacactctctctgaaggaataagacagtggtggaagctcaaacctggcccaccaccaccaaagcccgcagagcggcatcaggacgacagcaggggtcttgtgcttcctgggtacaagtacctcggacccttcaacggactcgacaaaggagagccggtcaacgaggcagacgctgcggccctcgagcacgacaaggcctacgaccggcagctcgacagcggagacaacccgtaccccaagtacaaccacgccgacgcggagtttcaggagcgtcttaaagaagatacgtcttttgggggcaacctcggacgagcagtcttccaggcgaaaaagagggttcttgaacctctgggcctggttgaggaacctgttaagacggctccgggaaaaaagaggccggtagagcactctcctgcggagccagactcctcctcgggaaccggaaaagcgggccagcagcctgcaagaaagagattgaatttcggtcagactggagacgcagactccgtacctgacccccagcctctcggacagccaccagcagcccccacaagtttgggatctactacaatggctacaggcagtggcgcaccaatggcagacaataacgagggtgccgatggagtgggtaattcctcaggaaattggcattgcgattcccaatggctgggcgacagagtcatcaccaccagcacccgaacctgggccctgcccacctacaacaaccacctctacaagcaaatctccagccaatcaggagcatcgaacgacaaccactactttggctacagcaccccttgggggtattttgacttcaacagattccactgtcacttctccccacgtgactggcaaagactcatcaacaacaactggggattccgacccaagagactcaacttcaagctctttaacattcaagtcaaagaggtcacgcagaatgacggtacgacgacgattgccaataaccttaccagcacggttcaggtgtttactgactcggagtaccagctcccgtacgtcctcggctcggcgcatcaaggatgcctcccgccgtttccagcggacgtcttcatggtcccacagtatggatacctcaccctgaacaacgggagtcaggcggtaggacgctcttccttttactgcctggagtactttccttctcagatgctgcgtaccggaaacaactttaccttcagctacacctttgaggacgtgcctttccacagcagctacgctcacagccagagtttggaccggctgatgaatcctctgatcgaccagtatctgtattatctgaacaggacacaatcaaatagtggaactcttcagcagtctaggctactgtttagccaagctggacccaccagcatgtctcttcaagctaaaaactggctgcctggaccttgctacagacagcagcgtctgtcaaagcaggcaaacgacaacaacaacagcaactttccctggactgcggctacaaagtatcatctaaatggtcgggactcgttggttaatccaggaccagctatggccagccacaaagacgatgaagaaaagtttttccccatgcatggaaccctgatatttggtaaacaaggaacaaatgctaacgacgcggatttggaacatgtcatgattacagatgaagaagaaatcaggaccaccaatcccgtggctacagagcagtacggaaacgtgtcaaataatttgcaaaactcaaatactggtccaactacagaaaatgtcaatcaccagggagcgttacctggtatggtgtggcaggatcgagacgtgtacctgcagggacccatttgggccaagattcctcacaccgacggacactttcacccttctccactgatgggaggttttggactcaaacacccgcctcctcaaatcatgatcaaaaacactcctgttccagccaatcctcctacaaacttcagcgcggcaaagtttgcttccttcatcacacagtattccacgggacaggtcagcgtggagatcgagtgggagctgcagaaggagaacagcaaacgctggaaccccgagatccagtacacttccaactacaacaaatctgttaatgtggactttactgtggacactaatggtgtgtattcagagcctcgccccattggcaccagatacctgactcgtaatctgtaa

SEQ ID NO: 2200 - DNA, 2208 bp, Artificial Sequence
  Synthetic Polynucleotide
atggctgccgatggttatcttccagattggctcgaggacactctctctgaaggaataagacagtggtggaagctcaaacctggcccaccaccaccaaagcccgcagagcggcatcaggacgacagcaggggtcttgtgcttcctgggtacaagtacctcggacccttcaacggactcgacaaaggagagccggtcaacgaggcagacgctgcggccctcgagcacgacaaggcctacgaccggcagctcgacagcggagacaacccgtacctcaagtacaaccacgccgacgcggagtttcaggagcgtcttaaagaagatacgtcttttgggggcaacctcggacgagcagtcttccaggcgaaaaagagggttcttgaacctctgggcctggttgaggaacctgttaagacggctccgggaaaaaagaggccggtagagcactctcctgcggagccagactcctcctcgggaaccggaaaagcgggccagcagcctgcaagaaagagattgaatttcggtcagactggagacgcagactccgtacctgacccccagcctctcggacagccaccagcagcccccacaagtttgggatctactacaatggctacaggcagtggcgcaccaatggcagacaataacgagggtgccgatggagtgggtaattcctcaggaaattggcattgcgattcccaatggctgggcgacagagtcatcaccaccagcacccgaacctgggccctgcccacctacaacaaccacctctacaagcaaatctccagccaatcaggagcatcgaacgacaaccactactttggctacagcaccccttgggggtattttgacttcaacagattccactgtcacttctccccacgtgactggcaaagactcatcaacaacaactggggattccgacccaagagactcaacttcaagctctttaacattcaagtcaaagaggtcacgcagaatgacggtacgacgacgattgccaataaccttaccagcacggttcaggtgtttactgactcggagtaccagctcccgtacgtcctcggctcggcgcatcaaggatgcctcccgccgtttccagcggacgtcttcatggtcccacagtatggatacctcaccctgaacaacgggagtcaggcggtaggacgctcttccttttactgcctggagtactttccttctcagatgctgcgtaccggaaacaactttaccttcagctacacctttgaggacgtgcctttccacagcagctacgctcacagccagagtttggaccggctgatgaatcctctgatcgaccagtatctgtattatctgaacaggacacaatcaaatagtggaactcttcagcagtctaggctactgtttagccaagctggacccaccagcatgtctcttcaagctaaaaactggctgcctggaccttgctacagacagcagcgtctgtcaaagcaggcaaacgacaacaacaacagcaactttccctggactgcggctacaaagtatcatctaaatggtcgggactcgttggttaatccaggaccagctatggccagccacaaagacgatgaagaaaagtttttccccatgcatggaaccctgatatttggtaaacaaggaacaaatgctaacgacgcggatttggaacatgtcatgattacagatgaagaagaaatcagggccaccaatcccgtggctacagagcagtacggaaacgtgtcaaataatttgcaaaactcaaatactggtccaactacagaaaatgtcaatcaccagggagcgttacctggtatggtgtggcaggatcgagacgtgtacctgcagggacccatttgggccaagattcctcacaccgacggacactttcacccttctccactgatgggaggttttggactcaaacacccgcctcctcaaatcatgatcaaaaacactcctgttccagccaatcctcctacaaacttcagcgcggcaaagtttgcttccttcatcacacagtattccacgggacaggtcagcgtggagatcgagtgggagctgcagaaggagaacagcaaacgctggaaccccgagatccagtacacttccaactacaacaaatctgttaatgtggactttactgtggacactaatggtgtgtattcagagcctcgccccattggcaccagatacctgactcgtaatctgtaa

SEQ ID NO: 2201 - DNA, 2208 bp, Artificial Sequence
  Synthetic Polynucleotide
atggctgccgatggttatcttccagattggctcgaggacactctctctgaaggaataagacagtggtggaagctcaaacctggcccaccaccaccaaagcccgcagagcggcatcaggacgacagcaggggtcttgtgcttcctgggtacaagtacctcggacccttcaacggactcgacaaaggagagccggtcaacgaggcagacgctgcggccctcgagcacgacaaggcctacgaccggcagctcgacagcggagacaacccgtacctcaagtacaaccacgccgacgcggagtttcaggagcgtcttaaagaagatacgtcttttgggggcaacctcggacgagcagtcttccaggcgaaaaagagggttcttgaacctctgggcctggttgaggaacctgttaagacggctccgggaaaaaagaggccggtagagcactctcctgcggagccagactcctcctcgggaaccggaaaagcgggccagcagcctgcaagaaagagattgaatttcggtcagactggagacgcagactccgtacctgacccccagcctctcggacagccaccagcagcccccacaagtttgggatctactacaatggctacaggcagtggcgcaccaatggcagacaataacgagggtgccgatggagtgggtaattcctcaggaaattggcattgcgattcccaatggctgggcgacagagtcatcaccaccagcacccgaacctgggccctgcccacctacaacaaccacctctacaagcaaatctccagccaatcaggagcatcgaacgacaaccactactttggctacagcaccccttgggggtattttgacttcaacagattccactgtcgcttctccccacgtgactggcaaagactcatcaacaacaactggggattccgacccaagagactcaacttcaagctctttaacattcaagtcaaagaggtcacgcagaatgacggtacgacgacgattgccaataaccttaccagcacggttcaggtgtttactgactcggagtaccagctcccgtacgtcctcggctcggcgcatcaaggatgcctcccgccgtttccagcggacgtcttcatggtcccacagtatggatacctcaccctgaacaacgggagtcaggcggtaggacgctcttccttttactgcctggagtactttccttctcagatgctgcgtaccggaaacaactttaccttcagctacacctttgaggacgtgcctttccacagcagctacgctcacagccagagtttggaccggctgatgaatcctctgatcgaccagtatctgtattatctgaacaggacacaatcaaatagtggaactcttcagcagtctaggctactgtttagccaagctggacccaccagcatgtctcttcaagctaaaaactggctgcctggaccttgctacagacagcagcgtctgtcaaagcaggcaaacgacaacaacaacagcaactttccctggactgcggctacaaagtatcatctaaatggtcgggactcgttggttaatccaggaccagctatggccagccacaaagacgatgaagaaaagtttttccccatgcatggaaccctgatatttggtaaacaaggaacgaatgctaacgacgcggatttggaacatgtcatgattacagatgaagaagaaatcaggaccaccaatcccgtggctacagagcagtacggaaacgtgtcaaataatttgcaaaactcaaatactggtccaactacagaaaatgtcaatcaccagggagcgttacctggtatggtgtggcaggatcgagacgtgtacctgcagggacccatttgggccaagattcctcacaccgacggacactttcacccttctccactgatgggaggttttggactcaaacacccgcctcctcaaatcatgatcaaaaacactcctgttccagccaatcctcctacaaacttcagcgcggcaaagtttgcttccttcatcacacagtattccacgggacaggtcagcgtggagatcgagtgggagctgcagaaggagaacagcaaacgctggaaccccgagatccagtacacttccaactacaacaaatctgttaatgtggactttactgtggacactaatggtgtgtattcagagcctcgccccattggcaccagatacctgactcgtaatctgtaa

SEQ ID NO: 2202 - DNA, 2208 bp, Artificial Sequence
  Synthetic Polynucleotide
atggctgccgatggttatcttccagattggctcgaggacactctctctgaaggaataagacagtggtggaagctcaaacctggcccaccaccaccaaagcccgcagagcggcatcaggacgacagcaggggtcttgtgcttcctgggtacaagtacctcggacccttcaacggactcgacaaaggagagccggtcaacgaggcagacgctgcggccctcgagcacgacaaggcctacgaccggcagctcgacagcggagacaacccgtacctcaagtacaaccacgccgacgcggagtttcaggagcgtcttaaagaagatacgtcttttgggggcaacctcggacgagcagtcttccaggcgaaaaagagggttcttgaacctctgggcctggttgaggaacctgttaagacggctccgggaaaaaagaggccggtagagcactctcctgcggagccagactcctcctcgggaaccggaaaagcgggccagcagcctgcaagaaagagattgaatttcggtcagactggagacgcagactccgtacctgacccccagcctctcggacagccaccagcagcccccacaagtttgggatctactacaatggctacaggcagtggcgcaccaatggcagacaataacgagggtgccgatggagtgggtaattcctcaggaaattggcattgcgattcccaatggctgggcgacagagtcatcaccaccagcacccgaacctgggccctgcccacctacaacaaccacctctacaagcaaatctccagccaatcaggagcatcgaacgacaaccactactttggctacagcaccccttgggggtattttgacttcaacagattccactgtcacttctccccacgtgactggcaaagactcatcaacaacaactggggattccgacccaagagactcaacttcaagctctttaacattcaagtcaaagaggtcacgcagaatgacggtacgacgacgattgccaataaccttaccagcacggttcaggtgtttactgactcggagtaccagctcccgtacgtcctcggctcggcgcatcaaggatgcctcccgccgtttccagcggacgtcttcatggtcccacagtatggatacctcaccctgaacaacgggagtcaggcggtaggacgctcttccttttactgcctggagtactttccttctcagatgctgcgtaccggaaacaactttaccttcagctacacctttgaggacgtgcctttccgcagcagctacgctcacagccagagtttggaccggctgatgaatcctctgatcgaccagtatctgtattatctgaacaggacacaatcaaatagtggaactcttcagcagtctaggctactgtttagccaagctggacccaccagcatgtctcttcaagctaaaaactggctgcctggaccttgctacagacagcagcgtctgtcaaagcaggcaaacgacaacaacaacagcaactttccctggactgcggctacaaagtatcatctaaatggtcgggactcgttggttaatccaggaccagctatggccagccacaaagacgatgaagaaaagtttttccccatgcatggaaccctgatatttggtaaacaaggaacaaatgctaacgacgcggatttggaacatgtcatgattacagatgaagaagaaatcaggaccaccaatcccgtggctacagagcagtacggaaacgtgtcaaataatttgcaaaactcaaatactggtccaactacagaaaatgtcaatcaccagggagcgttacctggtatggtgtggcaggatcgagacgtgtacctgcagggacccatttgggccaagattcctcacaccgacggacactttcacccttctccactgatgggaggttttggactcaaacacccgcctcctcaaatcatgatcaaaaacactcctgttccagccaatcctcctacaaacttcagcgcggcaaagtttgcttccttcatcacacagtattccacgggacaggtcagcgtggagatcgagtgggagctgcagaaggagaacagcaaacgctggaaccccgagatccagtacacttccaactacaacaaatctgttaatgtggactttactgtggacactaatggtgtgtattcagagcctcgccccattggcaccagatacctgactcgtaatctgtaa

SEQ ID NO: 2203 - DNA, 2208 bp, Artificial Sequence
  Synthetic Polynucleotide
atggctgccgatggttatcttccagattggctcgaggacactctctctgaaggaataagacagtggtggaagctcaaacctggcccaccaccaccaaagcccgcagagcggcatcaggacgacagcaggggtcttgtgcttcctgggtacaagtacctcggacccttcaacggactcgacaaaggagagccggtcaacgaggcagacgctgcggccctcgagcacgacaaggcctacgaccggcagctcgacagcggagacaacccgtacctcaagtacaaccacgccgacgcggagtttcaggagcgtcttaaagaagatacgtcttttgggggcaacctcggacgagcagtcttccaggcgaaaaagagggttcttgaacctctgggcctggttgaggaacctgttaagacggctccgggaaaaaagaggccggtagagcactctcctgcggagccagactcctcctcgggaaccggaaaagcgggccagcagcctgcaagaaagagattgaatttcggtcagactggagacgcagactccgtacctgacccccagcctctcggacagccaccagcagcccccacaagtttgggatctactacaatggctacaggcagtggcgcaccaatggcagacaataacgagggtgccgatggagtgggtaattcctcaggaaattggcattgcgattcccaatggctgggcgacagagtcatcaccaccagcacccgaacctgggccctgcccacctacagcaaccacctctacaagcaaatctccagccaatcaggagcatcgaacgacaaccactactttggctacagcaccccttgggggtattttgacttcaacagattccactgtcacttctccccacgtgactggcaaagactcatcaacaacaactggggattccgacccaagagactcaacttcaagctctttaacattcaagtcaaagaggtcacgcagaatgacggtacgacgacgattgccaataaccttaccagcacggttcaggtgtttactgactcggagtaccagctcccgtacgtcctcggctcggcgcatcaaggatgcctcccgccgtttccagcggacgtcttcatggtcccacagtatggatacctcaccctgaacaacgggagtcaggcggtaggacgctcttccttttactgcctggagtactttccttctcagatgctgcgtaccggaaacaactttaccttcagctacacctttgaggacgtgcctttccacagcagctacgctcacagccagagtttggaccggctgatgaatcctctgatcgaccagtatctgtattatctgaacaggacacaatcaaatagtggaactcttcagcagtctaggctactgtttagccaagctggacccaccagcatgtctcttcaagctaaaaactggctgcctggaccttgctacagacagcagcgtctgtcaaagcaggcaaacgacaacaacaacagcaactttccctggactgcggctacaaagtatcatctaaatggtcgggactcgttggttaatccaggaccagctatggccagccacaaagacgatgaagaaaagtttttccccatgcatggaaccctgatatttggtaaacaaggaacaaatgctaacgacgcggatttggaacatgtcatgattacagatgaagaagaaatcaggaccaccaatcccgtggctacagagcagtacggaaacgtgtcaaataatttgcaaaactcaaatactggtccaactacagaaaatgtcaatcaccagggagcgttacctggtatggtgtggcaggatcgagacgtgtacctgcagggacccatttgggccaagattcctcacaccgacggacactttcacccttctccactgatgggaggttttggactcaaacacccgcctcctcaaatcatgatcaaaaacactcctgttccagccaatcctcctacaaacttcagcgcggcaaagtttgcttccttcatcacacagtattccacgggacaggtcagcgtggagatcgagtgggagctgcagaaggagaacagcaaacgctggaaccccgagatccagtacacttccaactacaacaaatctgttaatgtggactttactgtggacactaatggtgtgtattcagagcctcgccccattggcaccagatacctgactcgtaatctgtaa

SEQ ID NO: 2204 - DNA, 2208 bp, Artificial Sequence
  Synthetic Polynucleotide
atggctgccgatggttatcttccagattggctcgaggacactctctctgaaggaataagacagtggtggaagctcaaacctggcccaccaccaccaaagcccgcagagcggcatcaggacgacagcaggggtcttgtgcttcctgggtacaagtacctcggacccttcaacggactcgacaaaggagagccggtcaacgaggcagacgctgcggccctcgagcacgacaaggcctacgaccggcagctcgacagcggagacaacccgtacctcaagtacaaccacgccgacgcggagtttcaggagcgtcttaaagaagatacgtcttttgggggcaacctcggacgagcagtcttccaggcgaaaaagagggttcttgaacctctgggcctggttgaggaacctgttaagacggctccgggaaaaaagaggccggtagagcactctcctgcggagccagactcctcctcgggaaccggaaaagcgggccagcagcctgcaagaaagagattgaatttcggtcagactggagacgcagactccgtacctgacccccagcctctcggacagccaccagcagcccccacaagtttgggatctactacaatggctacaggcagtggcgcaccaatggcagacaataacgagggtgccgatggagtgggtaattcctcaggaaattggcattgcgattcccaatggctgggcgacagagtcatcaccaccagcacccgaacctgggccctgcccacctacaacaaccacctctacaagcaaatctccagccaatcaggagcatcgaacgacaaccactactttggctacagcaccccttgggggtattttgacttcaacagattccactgtcacttctccccacgtgactggcaaagactcatcaacaacaactggggattccgacccaagagactcaacttcaagccctttaacattcaagtcaaagaggtcacgcagaatgacggtacgacgacgattgccaataaccttaccagcacggttcaggtgtttactgactcggagtaccagctcccgtacgtcctcggctcggcgcatcaaggatgcctcccgccgtttccagcggacgtcttcatggtcccacagtatggatacctcaccctgaacaacgggagtcaggcggtaggacgctcttccttttactgcctggagtactttccttctcagatgctgcgtaccggaaacaactttaccttcagctacacctttgaggacgtgcctttccacagcagctacgctcacagccagagtttggaccggctgatgaatcctctgatcgaccagtatctgtattatctgaacaggacacaatcaaatagtggaactcttcagcagtctaggctactgtttagccaagctggacccaccagcatgtctcttcaagctaaaaactggctgcctggaccttgctacagacagcagcgtctgtcaaagcaggcaaacgacaacaacaacagcaactttccctggactgcggctacaaagtatcatctaaatggtcgggactcgttggttaatccaggaccagctatggccagccacaaagacgatgaagaaaagtttttccccatgcatggaaccctgatatttggtaaacaaggaacaaatgctaacgacgcggatttggaacatgtcatgattacagatgaagaagaaatcaggaccaccaatcccgtggctacagagcagtacggaaacgtgtcaaataatttgcaaaactcaaatactggtccaactacagaaaatgtcaatcaccagggagcgttacctggtatggtgtggcaggatcgagacgtgtacctgcagggacccatttgggccaagattcctcacaccgacggacactttcacccttctccactgatgggaggttttggactcaaacacccgcctcctcaaatcatgatcaaaaacactcctgttccagccaatcctcctacaaacttcagcgcggcaaagtttgcttccttcatcacacagtattccacgggacaggtcagcgtggagatcgagtgggagctgcagaaggagaacagcaaacgctggaaccccgagatccagtacacttccaactacaacaaatctgttaatgtggactttactgtggacactaatggtgtgtattcagagcctcgccccattggcaccagatacctgactcgtaatctgtaa

SEQ ID NO: 2205 - DNA, 2208 bp, Artificial Sequence
  Synthetic Polynucleotide
atggctgccgatggttatcttccagattggctcgaggacactctctctgaaggaataagacagtggtggaagctcaaacctggcccaccaccaccaaagcccgcagagcggcatcaggacgacagcaggggtcttgtgcttcctgggtacaagtacctcggacccttcaacggactcgacaaaggagagccggtcaacgaggcagacgctgcggccctcgagcacgacaaggcctacgaccggcagctcgacagcggagacaacccgtacctcaagtacaaccacgccgacgcggagtttcaggagcgtcttaaagaagatacgtcttttgggggcaacctcggacgagcagtcttccaggcgaaaaagagggttcttgaacctctgggcctggttgaggaacctgttaagacggctccgggaaaaaagaggccggtagagcactctcctgcggagccagactcctcctcgggaaccggaaaagcgggccagcagcctgcaagaaagagattgaatttcggtcagactggagacgcagactccgtacctgacccccagcctctcggacagccaccagcagcccccacaagtttgggatctactacaatggctacaggcagtggcgcaccaatggcagacaataacgagggtgccgatggagtgggtaattcctcaggaaattggcattgcgattcccaatggctgggcgacagagtcatcaccaccagcacccgaacctgggccctgcccacctacaacaaccacctctacaagcaaatctccagccaatcaggagcatcgaacggcaaccactactttggctacagcaccccttgggggtattttgacttcaacagattccactgtcacttctccccacgtgactggcaaagactcatcaacaacaactggggattccgacccaagagactcaacttcaagctctttaacattcaagtcaaagaggtcacgcagaatgacggtacgacgacgattgccaataaccttaccagcacggttcaggtgtttactgactcggagtaccagctcccgtacgtcctcggctcggcgcatcaaggatgcctcccgccgtttccagcggacgtcttcatggtcccacagtatggatacctcaccctgaacaacgggagtcaggcggtaggacgctcttccttttactgcctggagtactttccttctcagatgctgcgtaccggaaacaactttaccttcagctacacctttgaggacgtgcctttccacagcagctacgctcacagccagagtttggaccggctgatgaatcctctgatcgaccagtatctgtattatctgaacaggacacaatcaaatagtggaactcttcagcagtctaggctactgtttagccaagctggacccaccagcatgtctcttcaagctaaaaactggctgcctggaccttgctacagacagcagcgtctgtcaaagcaggcaaacgacaacaacaacagcaactttccctggactgcggctacaaagtatcatctaaatggtcgggactcgttggttaatccaggaccagctatggccagccacaaagacgatgaagaaaagtttttccccatgcatggaaccctgatatttggtaaacaaggaacaaatgctaacgacgcggatttggaacatgtcatgattacagatgaagaagaaatcaggaccaccaatcccgtggctacagagcagtacggaaacgtgtcaaataatttgcaaaactcaaatactggtccaactacagaaaatgtcaatcaccagggagcgttacctggtatggtgtggcaggatcgagacgtgtacctgcagggacccatttgggccaagattcctcacaccgacggacactttcacccttctccactgatgggaggttttggactcaaacacccgcctcctcaaatcatgatcaaaaacactcctgttccagccaatcctcctacaaacttcagcgcggcaaagtttgcttccttcatcacacagtattccacgggacaggtcagcgtggagatcgagtgggagctgcagaaggagaacagcaaacgctggaaccccgagatccagtacacttccaactacaacaaatctgttaatgtggactttactgtggacactaatggtgtgtattcagagcctcgccccattggcaccagatacctgactcgtaatctgtaa

SEQ ID NO: 2206 - DNA, 2208 bp, Artificial Sequence
  Synthetic Polynucleotide
atggctgccgatggttatcttccagattggctcgaggacactctctctgaaggaataagacagtggtggaagctcaaacctggcccaccaccaccaaagcccgcagagcggcatcaggacgacagcaggggtcttgtgcttcctgggtacaagtacctcggacccttcaacggactcgacaaaggagagccggtcaacgaggcagacgctgcggccctcgagcacgacaaggcctacgaccggcagctcgacagcggagacaacccgtacctcaagtacaaccacgccgacgcggagtttcaggagcgtcttaaagaagatacgtcttttgggggcaacctcggacgagcagtcttccaggcgaaaaagagggttcttgaacctctgggcctggttgaggaacctgttaagacggctccgggaaaaaagaggccggtagagcactctcctgcggagccagactcctcctcgggaaccggaaaagcgggccagcagcctgcaagaaagagattgaatttcggtcagactggagacgcagactccgtacctgacccccagcctctcggacagccaccagcagcccccacaagtttgggatctactacaatggctacaggcagtggcgcaccaatggcagacaataacgagggtgccgatggagtgggtaattcctcaggaaattggcattgcgattcccaatggctgggcgacagagtcatcaccaccagcacccgaacctgggccctgcccacctacaacaaccacctctacaagcaaatctccagccaatcaggagcatcgaacgacaaccactactttggctacagcaccccttgggggtattttgacttcaacagattccactgtcacttctccccacgtgactggcaaagactcatcaacaacaactggggattccgacccaagagactcaacttcaagctctttaacattcaagtcaaagaggtcacgcagaatgacggtacgacgacgattgccaataaccttaccagcacggttcaggtgtttactgactcggagtaccagctcccgtacgtcctcggctcggcgcatcaaggatgcctcccgccgtttccagcggacgtcttcatggtcccacagtatggatacctcaccctgaacaacgggagtcaggcggtaggacgctcttccttttactgcctggagtactttccttctcagatgctgcgtaccggaaacaactttaccttcagctacacctttgaggacgtgcctttccacagcagctacgctcacagccagagtttggaccggctgatgaatcctctgatcgaccagtatctgtattatctgaacaggacacaatcaaatagtggaactcttcagcagtctaggctactgtttagccaagctggacccaccagcatgtctcttcaagctaaaaactggctgcctggaccttgctacagacagcagcgtctgtcaaagcaggcaaacgacaacaacaacagcaactttccctggactgcggctacaaagtatcatctaaatggtcgggactcgttggttaatccaggaccagctatggccagccacaaagacgatgaagaaaagtttttccccatgcatggaaccctgatatttggtaaacaaggaacaaatgctaacgacgcggatttggaacatgtcatgattacagatgaagaagaaatcaggaccgccaatcccgtggctacagagcagtacggaaacgtgtcaaataatttgcaaaactcaaatactggtccaactacagaaaatgtcaatcaccagggagcgttacctggtatggtgtggcaggatcgagacgtgtacctgcagggacccatttgggccaagattcctcacaccgacggacactttcacccttctccactgatgggaggttttggactcaaacacccgcctcctcaaatcatgatcaaaaacactcctgttccagccaatcctcctacaaacttcagcgcggcaaagtttgcttccttcatcacacagtattccacgggacaggtcagcgtggagatcgagtgggagctgcagaaggagaacagcaaacgctggaaccccgagatccagtacacttccaactacaacaaatctgttaatgtggactttactgtggacactaatggtgtgtattcagagcctcgccccattggcaccagatacctgactcgtaatctgtaa

SEQ ID NO: 2207 - DNA, 2208 bp, Artificial Sequence
  Synthetic Polynucleotide
atggctgccgatggttatcttccagattggctcgaggacactctctctgaaggaataagacagtggtggaagctcaaacctggcccaccaccaccaaagcccgcagagcggcatcaggacgacagcaggggtcttgtgcttcctgggtacaagtacctcggacccttcaacggactcgacaaaggagagccggtcaacgaggcagacgctgcggccctcgagcacgacaaggcctacgaccggcagctcgacagcggagacaacccgtacctcaagtacaaccacgccgacgcggagtttcaggagcgtcttaaagaagatacgtcttttgggggcaacctcggacgagcagtcttccaggcgaaaaagagggttcttgaacctctgggcctggttgaggaacctgttaagacggctccgggaaaaaagaggccggtagagcactctcctgcggagccagactcctcctcgggaaccggaaaagcgggccagcagcctgcaagaaagagattgaatttcggtcagactggagacgcagactccgtacctgacccccagcctctcggacagccaccagcagcccccacaagtttgggatctactacaatggctacaggcagtggcgcaccaatggcagacaataacgagggtgccgatggagtgggtaattcctcaggaaattggcattgcgattcccaatggctgggcgacagagtcatcaccaccagcacccgaacctgggccctgcccacctacaacaaccacctctacaagcaaatctccagccaatcaggagcatcgaacgacaaccactactttggctacagcaccccttgggggtattttgacttcaacagattccactgtcacttctccccacgtgactggcaaagactcatcaacaacaactggggattccgacccaagagactcaacttcaagctctttaacattcaagtcaaagaggtcacgcagaatgacggtacgacgacgattgccaataaccttaccagcacggttcaggtgtttactgactcggagtaccagctcccgtacgtcctcggctcggcgcatcaaggatgcctcccgccgtttccagcggacgtcttcatggtcccacagtatggatacctcaccctgaacaacgggagtcaggcggtaggacgctcttccttttactgcctggagtactttccttctcagatgctgcgtaccggaaacaactttaccttcagctacacctttgagggcgtgcctttccacagcagctacgctcacagccagagtttggaccggctgatgaatcctctgatcgaccagtatctgtattatctgaacaggacacaatcaaatagtggaactcttcagcagtctaggctactgtttagccaagctggacccaccagcatgtctcttcaagctaaaaactggctgcctggaccttgctacagacagcagcgtctgtcaaagcaggcaaacgacaacaacaacagcaactttccctggactgcggctacaaagtatcatctaaatggtcgggactcgttggttaatccaggaccagctatggccagccacaaagacgatgaagaaaagtttttccccatgcatggaaccctgatatttggtaaacaaggaacaaatgctaacgacgcggatttggaacatgtcatgattacagatgaagaagaaatcaggaccaccaatcccgtggctacagagcagtacggaaacgtgtcaaataatttgcaaaactcaaatactggtccaactacagaaaatgtcaatcaccagggagcgttacctggtatggtgtggcaggatcgagacgtgtacctgcagggacccatttgggccaagattcctcacaccgacggacactttcacccttctccactgatgggaggttttggactcaaacacccgcctcctcaaatcatgatcaaaaacactcctgttccagccaatcctcctacaaacttcagcgcggcaaagtttgcttccttcatcacacagtattccacgggacaggtcagcgtggagatcgagtgggagctgcagaaggagaacagcaaacgctggaaccccgagatccagtacacttccaactacaacaaatctgttaatgtggactttactgtggacactaatggtgtgtattcagagcctcgccccattggcaccagatacctgactcgtaatctgtaa

SEQ ID NO: 2208 - DNA, 2208 bp, Artificial Sequence
  Synthetic Polynucleotide
atggctgccgatggttatcttccagattggctcgaggacactctctctgaaggaataagacagtggtggaagctcaaacctggcccaccaccaccaaagcccgcagagcggcatcaggacgacagcaggggtcttgtgcttcctgggtacaagtacctcggacccttcaacggactcgacaaaggagagccggtcaacgaggcagacgctgcggccctcgagcacgacaaggcctacgaccggcagctcgacagcggagacaacccgtacctcaagtacaaccacgccgacgcggagtttcaggagcgtcttaaagaagatacgtcttttgggggcaacctcggacgagcagtcttccaggcgaaaaagagggttcttgaacctctgggcctggttgaggaacctgttaagacggctccgggaaaaaagaggccggtagagcactctcctgcggagccagactcctcctcgggaaccggaaaagcgggccagcagcctgcaagaaagagattgaatttcggtcagactggagacgcagactccgtacctgacccccagcctctcggacagccaccagcagcccccacaagtttgggatctactacaatggctacaggcagtggcgcaccaatggcagacaataacgagggtgccgatggagtgggtaattcctcaggaaattggcattgcgattcccaatggctgggcgacagagtcatcaccaccagcacccgaacctgggccctgcccacctacaacaaccacctctacaagcaaatctccagccaatcaggagcatcgaacgacaaccactactttggctacagcaccccttgggggtattttgacttcaacagattccactgtcacttctccccacgtgactggcaaagactcatcaacaacaactggggattccgacccaagagactcaacttcaagctctttaacattcaagtcaaagaggtcacgcagaatgacggtacgacgacgattgccaataaccttaccagcacggttcaggtgtttactgactcggagtaccagctcccgtacgtcctcggctcggcgcatcaaggatgcctcccgccgtttccagcggacgtcttcatggtcccacagtatggatacctcaccctgaacaacgggagtcaggcggtaggacgctcttccttttactgcctggagtactttccttctcagatgctgcgtaccggaaacaactttaccttcagctacacctttgaggacgtgcctttccacagcagctacgctcacagccagagtttggaccggctgatgaatcctctgatcgaccagtatctgtattatctgaacaggacacaatcaaatagtggaactcttcagcagtctaggctactgtttagccaagctggacccaccagcatgtctcttcaagctaaaaactggctgcctggaccttgctacagacagcagcgtctgtcaaagcaggcaaacgacaacaacaacagcaactttccctggactgcggctacaaagtatcatctaaatggtcgggactcgttggttaatccaggaccagctatggccagccacaaagacgatgaagaaaagtttttccccatgcatggaaccctgatatttggtaaacaaggaacaaatgctaacgacgcggatttggaacatgtcatgattacagatgaagaagaaatcaggaccaccaatcccgtggctacagagcagtacggaaacgtgtcaaataatttgcaaaactcaaatactggtccaactacagaaaatgtcaatcaccagggagcgttacctggtatggtgtggcaggatcgagacgtgtacctgcagggacccatttgggccaagattcctcacaccgacggacactttcacccttctccactgatgggaggttttggactcaaacacccgcctcctcaaatcatgatcaaaaacactcctgttccagccaatcctcctacaaacttcagcgcggcaaagtttgcttccttcatcacacagtattccacgggacaggtcagcgtggagatcgagtgggagctgcagaaggagaacagcaaacgctggaaccccgagatccagtacacttccaactacagcaaatctgttaatgtggactttactgtggacactaatggtgtgtattcagagcctcgccccattggcaccagatacctgactcgtaatctgtaa

SEQ ID NO: 2209 - DNA, 2208 bp, Artificial Sequence
  Synthetic Polynucleotide
atggctgccgatggttatcttccagattggctcgaggacactctctctgaaggaataagacagtggtggaggctcaaacctggcccaccaccaccaaagcccgcagagcggcatcaggacgacagcaggggtcttgtgcttcctgggtacaagtacctcggacccttcaacggactcgacaaaggagagccggtcaacgaggcagacgctgcggccctcgagcacgacaaggcctacgaccggcagctcgacagcggagacaacccgtacctcaagtacaaccacgccgacgcggagtttcaggagcgtcttaaagaagatacgtcttttgggggcaacctcggacgagcagtcttccaggcgaaaaagagggttcttgaacctctgggcctggttgaggaacctgttaagacggctccgggaaaaaagaggccggtagagcactctcctgcggagccagactcctcctcgggaaccggaaaagcgggccagcagcctgcaagaaagagattgaatttcggtcagactggagacgcagactccgtacctgacccccagcctctcggacagccaccagcagcccccacaagtttgggatctactacaatggctacaggcagtggcgcaccaatggcagacaataacgagggtgccgatggagtgggtaattcctcaggaaattggcattgcgattcccaatggctgggcgacagagtcatcaccaccagcacccgaacctgggccctgcccacctacaacaaccacctctacaagcaaatctccagccaatcaggagcatcgaacgacaaccactactttggctacagcaccccttgggggtattttgacttcaacagattccactgtcacttctccccacgtgactggcaaagactcatcaacaacaactggggattccgacccaagagactcaacttcaagctctttaacattcaagtcaaagaggtcacgcagaatgacggtacgacgacgattgccaataaccttaccagcacggttcaggtgtttactgactcggagtaccagctcccgtacgtcctcggctcggcgcatcaaggatgcctcccgccgtttccagcggacgtcttcatggtcccacagtatggatacctcaccctgaacaacgggagtcaggcggtaggacgctcttccttttactgcctggagtactttccttctcagatgctgcgtaccggaaacaactttaccttcagctacacctttgaggacgtgcctttccacagcagctacgctcacagccagagtttggaccggctgatgaatcctctgatcgaccagtatctgtattatctgaacaggacacaatcaaatagtggaactcttcagcagtctaggctactgtttagccaagctggacccaccagcatgtctcttcaagctaaaaactggctgcctggaccttgctacagacagcagcgtctgtcaaagcaggcaaacgacaacaacaacagcaactttccctggactgcggctacaaagtatcatctaaatggtcgggactcgttggttaatccaggaccagctatggccagccacaaagacgatgaagaaaagtttttccccatgcatggaaccctgatatttggtaaacaaggaacaaatgctaacgacgcggatttggaacatgtcatgattacagatgaagaagaaatcaggaccaccaatcccgtggctacagagcagtacggaaacgtgtcaaataatttgcaaaactcaaatactggtccaactacagaaaatgtcaatcaccagggagcgttacctggtatggtgtggcaggatcgagacgtgtacctgcagggacccatttgggccaagattcctcacaccgacggacactttcacccttctccactgatgggaggttttggactcaaacacccgcctcctcaaatcatgatcaaaaacactcctgttccagccaatcctcctacaaacttcagcgcggcaaagtttgcttccttcatcacacagtattccacgggacaggtcagcgtggagatcgagtgggagctgcagaaggagaacagcaaacgctggaaccccgagatccagtacacttccaactacaacaaatctgttaatgtggactttactgtggacactaatggtgtgtattcagagcctcgccccattggcaccagatacctgactcgtaatctgtaa

SEQ ID NO: 2210 - DNA, 2208 bp, Artificial Sequence
  Synthetic Polynucleotide
atggctgccgatggttatcttccagattggctcgaggacactctctctgaaggaataagacagtggtggaagctcaaacctggcccaccaccgccaaagcccgcagagcggcacaaggacgacagtaggggtcttgtgcttcctgggtacaagtacctcggacccttcaacggactcgacaaaggagagccggtcaacgaggcagacgccgcggccctcgagcacgacaaggcctacgaccggcagctcgacagcggagacaacccgtacctcaagtacaaccacgccgacgcggagtttcaggagcgtcttaaagaagatacgtcttttgggggcaacctcggacgagcagtattccaggcgaaaaagagggttcttgaacctctgggcctggttgaggagcctgttaagacggctccgggaaaaaagaggccggtagagcactctcctgtggagccagactcctcctcgggaaccggaaaagcgggccagcagcctgcaagaaaaagattgaattttggtcagactggagacgcagactccgtacctgacccccagcctctcggacagccaccagcagcccccacaagtttgggatctactacaatggctacaggcagtggcgcaccaatggcagacaataacgagggtgccgatggagtgggtaattcctcaggaaattggcattgcgattcccaatggctgggcgacagagtcatcaccaccagcacccgaacctgggccctgcccacctacaacaaccacctctacaagcaaatctccagccaatcaggagcatcgaacgacaaccactactttggccacagcaccccttgggggtattttgacttcaacagattccactgtcacttctccccacgtgactggcaaagactcatcaacaacaactggggattccgacccaagagactcaacttcaagctctttaacattcaagtcaaagaggtcacgcagaatgacggtacgacgacgattgccaataaccttaccagcacggttcaggtgtttactgactcggagtaccagctcccgtacgtcctcggctcggcgcatcaaggatgcctcccgccgttcccagcagacgtcttcatggtcccacagtatggatacctcaccctgaacaacgggagtcaggcggtaggacgctcttccttttactgcctggagtactttccttctcagatgcttcgtaccggaaacaactttaccttcagctacacctttgaagacgtgcctttccacagtagctacgctcacagccagagtctggatcggctgatgaatcctcttatcgaccagtacctgtattatctaaacaaaacacaatcaaatagtggaactcttcagcagtctcggctactgtttagtcaagctggacccaccagcatgtctcttcaagctaaaaactggctgcctggaccttgctacagacaacagcgtctgtcaaagcaggcaaacgacaacaacaacagcaactttccctggactgcggctacaaagtatcatctaaatggccgggactcgttggttaatccaggaccagctatggccagccacaaagacgatgaagaaaagtttttccccatgcatggaaccctgatatttggtaaacaaggaacaaatgctaacgacgcggatttggacaatgtcatgattacagatgaagaagaaatccgcaccaccaatcccgtggctacggagcagtacgggactgtgtcaaataatttgcaaaactcaaatactggtccaactactggaactgtcaatcaccaaggagcgttacctggtatggtgtggcaggatcgagacgtgtacctgcagggacccatttgggccaagattcctcacaccgatggacactttcatccttctccactgatgggaggttttggactcaaacacccgcctcctcagatcatgatcaaaaacactcccgttccagccaatcctcctacaaacttcagttctgccaagtctgcttccttcatcacacagtattccacgggacaagtcagcgtggagattgagtgggagctgcagaaggagaacagcaaacgctggaaccccgagatccagtacacttccaactacaacaaatctgttaatgtggactttactgtggacactaatggcgtgtattcagagcctcgccccattggcaccagatacctgactcgtaatctgtaa

SEQ ID NO: 2211 - DNA, 2208 bp, Artificial Sequence
  Synthetic Polynucleotide
atggctgccgatggttatcttccagattggctcgaggacactctctctgaaggaataagacagtggtggaagctcaaacctggcccaccaccgccaaagcccgcagagcggcacaaggacgacagtaggggtcttgtgcttcctgggtacaagtacctcggacccttcaacggactcgacaaaggagagccggtcaacgaggcagacgccgcggccctcgagcacgacaaggcctacgaccggcagctcgacagcggagacaacccgtacctcaagtacaaccacgccgacgcggagtttcaggagcgtcttaaagaagatacgtcttttgggggcaacctcggacgagcagtcttccaggcgaaaaagagggttcttgaacctctgggcctggttgaggaacctgttaagacggctccgggaaaaaagaggccggtagagcactctcctgtggagccagactcctcctcgggaaccggaaaggcgggccagcagcctgcaagaaaaagattgaattttggtcagactggagacgcagactcagtacctgacccccagcctctcggacagccaccagcagccccctctggtctgggaactaatacgatggctacaggcagtggcgcaccaatggcagacaataacgagggcgccgacggagtgggtaattcctcgggaaattggcattgcgattccacatggatgggcgacagagtcatcaccaccagcacccgaacctgggccctgcccacctacaacaaccacctctacaaacaaatttccagccaatcaggagcctcgaacgacaatcactactttggctacagcaccccttgggggtattttgacttcaacagattccactgccacttttcaccacgtgactggcaaagactcatcaacaacaactggggattccgacccaagagactcaacttcaagctctttaacattcaagtcaaagaggtcacgcagaatgacggtacgacgacgattgccaataaccttaccagcacggttcaggtgtttactgactcggagtaccagctcccgtacgtcctcggctcggcgcatcaaggatgcctcccgccgttcccagcagacgtcttcatggtcccacagtatggatacctcaccctgaacaacgggagtcaggcggtaggacgctcttccttttactgcctggagtactttccttctcagatgcttcgtaccggaaacaactttaccttcagctacacctttgaagacgtgcctttccacagtagctacgctcacagccagagtctggatcggctgatgaatcctcttatcgaccagtacctgtattatctaaacaaaacacaatcaaatagtggaactcttcagcagtctcggctactgtttagtcaagctggacccaccagcatgtctcttcaagctaaaaactggctgcctggaccttgctacagacaacagcgtctgtcaaagcaggcaaacgacaacaacaacagcaactttccctggactgcggctacaaagtatcatctaaatggccgggactcgttggttaatccaggaccagctatggccagccacaaagacgatgaagaaaagtttttccccatgcatggaaccctgatatttggtaaacaaggaacaaatgctaacgacgcggatttggacaatgtcatgattacagatgaagaagaaatccgcaccaccaatcccgtggctacggagcagtacgggactgtgtcaaataatttgcaaaactcaaatactggtccaactactggaactgtcaatcaccaaggagcgttacctggtatggtgtggcaggatcgagacgtgtacctgcagggacccatttgggccaagattcctcacaccgatggacactttcatccttctccactgatgggaggttttggactcaaacacccgcctcctcagatcatgatcaaaaacactcccgttccagccaatcctcctacaaacttcagttctgccaagtttgcttccttcatcacacagtattccacgggacaagtcagcgtggagattgagtgggagctgcagaaggagaacagcaaacgctggaaccccgagatccagtacacttccaactacaacaaatctgttaatgtggactttactgtggacactaatggcgtgtattcagagcctcgccccattggcaccagatacctgactcgtaatctgtaa

SEQ ID NO: 2212 - DNA, 2208 bp, Artificial Sequence
  Synthetic Polynucleotide
atggctgccgatggttatcttccagattggctcgaggacactctccctgaaggaataagacagtggtggaagctcaaacctggcccaccaccgccaaagcccgcagagcggcacaaggacgacagtaggggtcttgtgcttcctgggtacaagtacctcggacccttcaacggactcgacaaaggagagccggtcaacgaggcagacgccgcggccctcgagcacgacaaggcctacgaccggcagctcgacagcggagacaacccgtacctcaagtacaaccacgccgacgcggagtttcaggagcgtcttaaagaagatacgtcttttgggggcaacctcggacgagcagtattccaggcgaaaaagagggttcttgaacctctgggcctggttgaggagcctgttaagacggctccgggaaaaaagaggccggtagagcactctcctgtggagccagactcctcctcgggaaccggaaaagcgggccagcagcctgcaagaaaaagattgaattttggtcagactggagacgcagactccgtacctgacccccagcctctcggacagccaccagcagcccccacaagtttgggatctactacaatggctacaggcagtggcgcaccaatggcagacaataacgagggtgccgatggagtgggtaattcctcaggaaattggcattgcgattcccaatggctgggcgacagagtcatcaccaccagcacccgaacctgggccctgcccacctacaacaaccacctctacaagcaaatctccagccaatcaggagcatcgaacgacaaccactactttggccacagcaccccttgggggtattttgacttcaacagattccactgtcacttctccccacgtgactggcaaagactcatcaacaacaactggggattccgacccaagagactcaacttcaagctctttaacattcaagtcaaagaggtcacgcagaatgacggtacgacgacgattgccaataaccttaccagcacggttcaggtgtttactgactcggagtaccagctcccgtacgtcctcggctcggcgcatcaaggatgcctcccgccgttcccagcagacgtcttcatggtcccacagtatggatacctcaccctgaacaacgggagtcaggcggtaggacgctcttccttttactgcctggagtactttccttctcagatgcttcgtaccggaaacaactttaccttcagctacacctttgaagacgtgcctttccacagtagctacgctcacagccagagtctggatcggctgatgaatcctcttatcgaccagtacctgtattatctaaacaaaacacaatcaaatagtggaactcttcagcagtctcggctactgtttagtcaagctggacccaccagcatgtctcttcaagctaaaaactggctgcctggaccttgctacagacaacagcgtctgtcaaagcaggcaaacgacaacaacaacagcaactttccctggactgcggctacaaagtatcatctaaatggccgggactcgttggttaatccaggaccagctatggccagccacaaagacgatgaagaaaagtttttccccatgcatggaaccctgatatttggtaaacaaggaacaaatgctaacgacgcggatttggacaatgtcatgattacagatgaagaagaaatccgcaccaccaatcccgtggctacggagcagtacgggactgtgtcaaataatttgcaaaactcaaatactggtccaactactggaactgtcaatcaccaaggagcgttacctggtatggtgtggcaggatcgagacgtgtacctgcagggacccatttgggccaagattcctcacaccgatggacactttcatccttctccactgatgggaggttttggactcaaacacccgcctcctcagatcatgatcaaaaacactcccgttccagccaatcctcctacaaacttcagttctgccaagtttgcttccttcatcacacagtattccacgggacaagtcagcgtggagattgagtgggagctgcagaaggagaacagcaaacgctggaaccccgagatccagtacacttccaactacaacaaatctgttaatgtggactttactgtggacactaatggcgtgtattcagagcctcgccccattggcaccagatacctgactcgtaatctgtaa

SEQ ID NO: 2213 - DNA, 2208 bp, Artificial Sequence
  Synthetic Polynucleotide
atggctgccgatggttatcttccagattggctcgaggacactctctctgaaggaataagacagtggtggaagctcaaacctggcccaccaccgccaaagcccgcagagcggcacaaggacgacagtaggggtcttgtgcttcctgggtacaagtacctcggacccttcaacggactcgacaaaggagagccggtcaacgaggcagacgccgcggccctcgagcacgacaaggcctacgaccggcagctcgacagcggagacaacccgtacctcaagtacaaccacgccgacgcggagtttcaggagcgtcttaaagaagatacgtcttttgggggcaacctcggacgagcagtattccaggcgaaaaagagggttcttgaacctctgggcctggttgaggagcctgttaagacggctccgggaaaaaagaggccggtagagcactctcctgtggagccagactcctcctcgggaaccggaaaagcgggccagcagcctgcaagaaaaagattgaattttggtcagactggagacgcagactccgtacctgacccccagcctctcggacagacaccagcagcccccacaagtttgggatctactacaatggctacaggcagtggcgcaccaatggcagacaataacgagggtgccgatggagtgggtaattcctcgggaaattggcattgcgattcccaatggctgggcgacagagtcatcaccaccagcacccgaacctgggccctgcccacctacaacaaccacctctacaagcaaatctccagccaatcaggagcatcgaacgacaaccactactttggctacagcaccccttgggggtattttgacttcaacagattccactgtcacttctccccacgtgactggcaaagactcatcaacaacaactggggattccgacccaagagactcaacttcaagctctttaacattcaagtcaaagaggtcacgcagaatgacggtacgacgacgattgccaataaccttaccagcacggttcaggtgtttactgactcggagtaccagctcccgtacgtcctcggctcggcgcatcaaggatgcctcccgccgttcccagcagacgtcttcatggtcccacagtatggatacctcaccctgaacaacgggagtcaggcggtaggacgctcttccttttactgcctggagtactttccttctcagatgcttcgtaccggaaacaactttaccttcagctacacctttgaagacgtgcctttccacagtagctacgctcacagccagagtctggatcggctgatgaatcctcttatcgaccagtacctgtattatctaaacaaaacacaatcaaatagtggaactcttcagcagtctcggctactgtttagtcaagctggacccaccagcatgtctcttcaagctaaaaactggctgcctggaccttgctacagacaacagcgtctgtcaaagcaggcaaacgacaacaacaacagcaactttccctggactgcggctacaaagtatcatctaaatggccgggactcgttggttaatccaggaccagctatggccagccacaaagacgatgaagaaaagtttttccccatgcatggaaccctgatatttggtaaacaaggaacaaatgctaacgacgcggatttggacaatgtcatgattacagatgaagaagaaatccgcaccaccaatcccgtggctacggagcagtacgggactgtgtcaaataatttgcaaaactcaaatactggtccaactactggaactgtcaatcaccaaggagcgttacctggtatggtgtggcaggatcgagacgtgtacctgcagggacccatttgggccaagattcctcacaccgatggacactttcatccttctccactgatgggaggttttggactcaaacacccgcctcctcagatcatgatcaaaaacactcccgttccagccaatcctcctacaaacttcagttctgccaagtttgcttccttcatcacacagtattccacaggacaagtcggcgtggagattgagtgggagctgcagaaggagaacagcaaacgctggaaccccgagatccagtacacttccaactacaacaaatctgttaatgtggactttactgtggacactaatggcgtgtattcagagcctcgccccattggcaccagatacctgactcgtaatctgtaa

SEQ ID NO: 2214 - DNA, 2208 bp, Artificial Sequence
  Synthetic Polynucleotide
atggctgccgatggttatcttccagattggctcgaggacactctctctgaaggaataagacagtggtggaagctcaaacctggcccaccaccgccaaagcccgcagagcggcacaaggacgacagtaggggtcttgtgcttcctgggtacaagtacctcggacccttcaacggactcgacaaaggagagccggtcaacgaggcagacgccgcggccctcgagcacgacaaggcctacgaccggcagctcgacagcggagacaacccgtacctcaagtacaaccacgccgacgcggagtttcaggagcgtcttaaagaagatacgtcttttgggggcaacctcggacgagcagtattccaggcgaaaaagagggttcttgaacctctgggcctggttgaggagcctgttaagacggctccgggaaaaaagaggccggtagagcactctcctgtggagccagactcctcctcgggaaccggaaaagcgggccagcagcctgcaagaaaaagattgaattttggtcagactggagacgcagactccgtacctgacccccagcctctcggacagacaccagcagcccccacaagtttgggatctactacaatggctacaggcagtggcgcaccaatggcagacaataacgagggtgccgatggagtgggtaattcctcgggaaattggcattgcgattcccaatggctgggcgacagagtcatcaccaccagcacccgaacctgggccctgcccacctacaacaaccacctctacaagcaaatctccagccaatcaggagcatcgaacgacaaccactactttggctacagcaccccttgggggtattttgacttcaacagattccactgtcacttctccccacgtgactggcaaagactcatcaacaacaactggggattccgacccaagagactcaacttcaagctctttaacattcaagtcaaagaggtcacgcagaatgacggtacgacgacgattgccaataaccttaccagcacggttcaggtgtttactgactcggagtaccagctcccgtacgtcctcggctcggcgcatcaaggatgcctcccgccgttcccagcagacgtcttcatggtcccacagtatggatacctcaccctgaacaacgggagtcaggcggtaggacgctcttccttttactgcctggagtactttccttctcagatgcttcgtaccggaaacaactttaccttcagctacacctttgaagacgtgcctttccacagtagctacgctcacagccagagtctggatcggctgatgaatcctcttatcgaccagtacctgtattatctaaacaaaacacaatcaaatagtggaactcttcagcagtctcggctactgtttagtcaagctggacccaccagcatgtctcttcaagctaaaaactggctgcctggaccttgctacagacaacagcgtctgtcaaagcaggcaaacgacaacaacaacagcaactttccctggactgcggctacaaagtatcatctaaatggccgggactcgttggttaatccaggaccagctatggccagccacaaagacgatgaagaaaagtttttccccatgcatggaaccctgatatttggtaaacaaggaacaaatgctaacgacgcggatttggacaatgtcatgattacagatgaagaagaaatccgcaccaccaatcccgtggctacggagcagtacgggactgtgtcaaataatttgcaaaactcaaatactggtccaactactggaactgtcaatcaccaaggagcgttacctggtatggtgtggcaggatcgagacgtgtacctgcagggacccatttgggccaagattcctcacaccgatggacactttcatccttctccactgatgggaggttttggactcaaacacccgcctcctcagatcatgatcaaaaacactcccgttccagccaatcctcctacaaacttcagttctgccaagtttgcttccttcatcacacagtattccacgggacaagtcagcgtggagattgagtgggagctgcagaaggagaacagcaaacgctggaaccccgagatccagtacacttccaactacaacaaatctgttaatgtggactttactgtggacactaatggcgtgtattcagagcctcgccccattggcaccagatacctgactcgtaatctgtaa

SEQ ID NO: 2215 - DNA, 2208 bp, Artificial Sequence
  Synthetic Polynucleotide
atggctgccgatggttatcttccagattggctcgaggacactctctctgaaggaataagacagtggtggaagctcaaacctggcccaccaccgccaaagcccgcagagcggcacaaggacgacagtaggggtcttgtgcttcctgggtacaagtacctcggacccttcaacggactcgacaaaggagagccggtcaacgaggcagacgccgcggccctcgagcacgacaaggcctacgaccggcagctcgacagcggagacaacccgtacctcaagtacaaccacgccgacgcggagtttcaggagcgtcttaaagaagatacgtcttttgggggcaacctcggacgagcagtattccaggcgaaaaagagggttcttgaacctctgggcctggttgaggagcctgttaagacggctccgggaaaaaagaggccggtagagcactctcctgtggagccagactcctcctcgggaaccggaaaagcgggccagcagcctgcaagaaaaagattgaattttggtcagactggagacgcagactccgtacctgacccccagcctctcggacagccaccagcagcccccacaagtttgggatctactacaatggctacaggcagtggcgcaccaatggcagacaataacgagggtgccgatggagtgggtaattcctcaggaaatcggcattgcgattcccaatggctgggcgacagagtcatcaccaccagcacccgaacctgggccctgcccacctacaacaaccacctctacaagcaaatctccagccaatcaggagcatcgaacgacaaccactactttggccacagcaccccttgggggtattttgacttcaacagattccactgtcacttctccccacgtgactggcaaagactcatcaacaacaactggggattccgacccaagagactcaacttcaagctctttaacattcaagtcaaagaggtcacgcagaatgacggtacgacgacgattgccaataaccttaccagcacggttcaggtgtttactgactcggagtaccagctcccgtacgtcctcggctcggcgcatcaaggatgcctcccgccgttcccagcagacgtcttcatggtcccacagtatggatacctcaccctgaacaacgggagtcaggcggtaggacgctcttccttttactgcctggagtactttccttctcagatgcttcgtaccggaaacaactttaccttcagctacacctttgaagacgtgcctttccacagtagctacgctcacagccagagtctggatcggctgatgaatcctcttatcgaccagtacctgtattatctaaacaaaacacaatcaaatagtggaactcttcagcagtctcggctactgtttagtcaagctggacccaccagcatgtctcttcaagctaaaaactggctgcctggaccttgctacagacaacagcgtctgtcaaagcaggcaaacgacaacaacaacagcaactttccctggactgcggctacaaagtatcatctaaatggccgggactcgttggttaatccaggaccagctatggccagccacaaagacgatgaagaaaagtttttccccatgcatggaaccctgatatttggtaaacaaggaacaaatgctaacgacgcggatttggacaatgtcatgattacagatgaagaagaaatccgcaccaccaatcccgtggctacggagcagtacgggactgtgtcaaataatttgcaaaactcaaatactggtccaactactggaactgtcaatcaccaaggagcgttacctggtatggtgtggcaggatcgagacgtgtacctgcagggacccatttgggccaagattcctcacaccgatggacactttcatccttctccactgatgggaggttttggactcaaacacccgcctcctcagatcatgatcaaaaacactcccgttccagccaatcctcctacaaacttcagttctgccaagtttgcttccttcatcacacagtattccacgggacaagtcagcgtggagattgagtgggagctgcagaaggagaacagcaaacgctggaaccccgagatccagtacacttccaactacaacaaatctgttaatgtggactttactgtggacactaatggcgtgtattcagagcctcgccccattggcaccagatacctgactcgtaatctgtaa

SEQ ID NO: 2216 - DNA, 2208 bp, Artificial Sequence
  Synthetic Polynucleotide
atggctgccgatggttatcttccagattggctcgaggacactctctctgaaggaataagacagtggtggaagctcaaacctggcccaccaccgccaaagcccgcagagcggcacaaggacgacagtaggggtcttgtgcttcctgggtacaagtacctcggacccttcaacggactcgacaaaggagagccggtcaacgaggcagacgccgcggccctcgagcacgacaaggcctacgaccggcagctcgacagcggagacaacccgtacctcaagtacaaccacgccgacgcggagtttcaggagcgtcttaaagaagatacgtcttttgggggcaacctcggacgagcagtattccaggcgaaaaagagggttcttgaacctctgggcctggttgaggagcctgttaagacggctccgggaaaaaagaggccggtagagcactctcctgtggagccagactcctcctcgggaaccggaaaagcgggccagcagcctgcaagaaaaagattgaattttggtcagactggagacgcagactccgtacctgacccccagcctctcggacagccaccagcagcccccacaagtttgggatctactacaatggctacaggcagtggcgcaccaatggcagacaataacgagggtgccgatggagtgggtaattcctcaggaaattggcattgcgattcccaatggctgggcgacagagtcatcaccaccagcacccgaacctgggccctgcccacctacaacaaccacctctacaagcaaatctccagccaatcaggagcatcgaacgacaaccactactttggctacagcaccccttgggggtattttgacttcaacagattccactgtcacttctccccacgtgactggcaaagactcatcaacaacaactggggattccgacccaagagactcaacttcaagctctttaacattcaagtcaaagaggtcacgcagaatgacggtacgacgacgattgccaataaccttaccagcacggttcaggtgtttactgactcggagtaccagctcccgtacgtcctcggctcggcgcatcaaggatgcctcccgccgttcccagcagacgtcttcatggtcccacagtatggatacctcaccctgaacaacgggagtcaggcggtaggacgctcttccttttactgcctggagtactttccttctcagatgcctcgtaccggaaacaactttaccttcagctacacctttgaagacgtgcctttccacagtagctacgctcacagccagagtctggatcggctgatgaatcctcttatcgaccagtacctgtattatctaaacaaaacacaatcaaatagtggaactcttcagcagtctcggctactgtttagtcaagctggacccaccagcatgtctcttcaagctaaaaactggctgcctggaccttgctacagacaacagcgtctgtcaaagcaggcaaacgacaacaacaacagcaactttccctggactgcggctacaaagtatcatctaaatggccgggactcgttggttaatccaggaccagctatggccagccacaaagacgatgaagaaaagtttttccccatgcatggaaccctgatatttggtaaacaaggaacaaatgctaacgacgcggatttggacaatgtcatgattacagatgaagaagaaatccgcaccaccaatcccgtggctacggagcagtacgggactgtgtcaaataatttgcaaaactcaaatactggtccaactactggaactgtcaatcaccaaggagcgttacctggtatggtgtggcaggatcgagacgtgtacctgcagggacccatttgggccaagattcctcacaccgatggacactttcatccttctccactgatgggaggttttggactcaaacacccgcctcctcagatcatgatcaaaaacactcccgttccagccaatcctcctacaaacttcagttctgccaagtttgcttccttcatcacacagtattccacgggacaagtcagcgtggagattgagtgggagctgcagaaggagaacagcaaacgctggaaccccgagatccagtacacttccaactacaacaaatctgttaatgtggactttactgtggacactaatggcgtgtattcagagcctcgccccattggcaccagatacctgactcgtaatctgtaa

SEQ ID NO: 2217 - DNA, 2208 bp, Artificial Sequence
  Synthetic Polynucleotide
atggctgccgatggttatcttccagattggctcgaggacactctctctgaaggaataagacagtggtggaagctcaaacctggcccaccaccgccaaagcccgcagagcggcacaaggacgacagtaggggtcttgtgcttcctgggtacaagtacctcggacccttcaacggactcgacaaaggagagccggtcaacgaggcagacgccgcggccctcgagcacgacaaggcctacgaccggcagctcgacagcggagacaacccgtacctcaagtacaaccacgccgacgcggagtttcaggagcgtcttaaagaagatacgtcttttgggggcaacctcggacgagcagtattccaggcgaaaaagagggttcttgaacctctgggcctggttgaggagcctgttaagacggctccgggaaaaaagaggccggtagagcactctcctgtggagccagactcctcctcgggaaccggaaaagcgggccagcagcctgcaagaaaaagattgaattttggtcagactggagacgcagactccgtacctgacccccagcctctcggacagccaccagcagcccccacaagtttgggatctactacaatggctacaggcagtggcgcaccaatggcagacaataacgagggtgccgatggagtgggtaattcctcgggaaattggcattgcgattcccaatggctgggcgacagagtcatcaccaccagcacccgaacctgggccctgcccacctacaacaaccacctctacaagcaaatctccagccaatcaggagcatcgaacgacaaccactactttggctacagcaccccttgggggtattttgacttcaacagattccactgtcacttctccccacgtgactggcaaagactcatcaacaacaactggggattccgacccaagagactcaacttcaagctctttaacattcaagtcaaagaggtcacgcagaatgacggtacgacgacgattgccaataaccttaccagcacggttcaggtgtttactgactcggagtaccagctcccgtacgtcctcggctcggcgcatcaaggatgcctcccgccgttcccagcagacgtcttcatggtcccacagtatggatacctcaccctgaacaacgggagtcaggcggtaggacgctcttccttttactgcctggagtactttccttctcagatgcttcgtaccggaaacaactttaccttcagctacacctttgaagacgtgcctttccacagtagctacgctcacagccagagtctggatcggctgatgaatcctcttatcgaccagtacctgtattatctaaacaaaacacaatcaaatagtggaactcttcagcagtctcggctactgtttagtcaagctggacccaccagcatgtctcttcaagctaaaaactggctgcctggaccttgctacagacaacagcgtctgtcaaagcaggcaaacgacaacaacaacagcaactttccctggactgcggctacaaagtatcatctaaatggccgggactcgttggttaatccaggaccagctatggccagccacaaagacgatgaagaaaagtttttccccatgcatggaaccctgatatttggtaaacaaggaacaaatgctaacgacgcggatttggacaatgtcatgattacagatgaagaagaaatccgcaccaccaatcccgtggctacggagcagtacgggactgtgtcaaataatttgcaaaactcaaatactggtccaactactggaactgtcaatcaccaaggagcgttacctggtatggtgtggcaggatcgagacgtgtacctgcagggacccatttgggccaagattcctcacaccgatggacactttcatccttctccactgatgggaggttttggactcaaacacccgcctcctcagatcatgatcaaaaacactcccgttccagccaatcctcctacaaacttcagttctgccaagtctgcttccttcatcacacagtattccacgggacaagtcagcgtggagattgagtgggagctgcagaaggagaacagcaaacgctggaaccccgagatccagtacacttccaactacaacaaatctgttaatgtggactttactgtggacactaatggcgtgtattcagagcctcgccccattggcaccagatacctgactcgtaatctgtaa

SEQ ID NO: 2218 - DNA, 2208 bp, Artificial Sequence
  Synthetic Polynucleotide
atggctgccgatggttatcttccagattggctcgaggacactctctctgaaggaataagacagtggtggaagctcaaacctggcccaccaccgccaaagcccgcagagcggcacaaggacgacagtaggggtcttgtgcttcctgggtacaagtacctcggacccttcaacggactcgacaaaggagagccggtcaacgaggcagacgccgcggccctcgagcacgacaaggcctacgaccggcagctcgacagcggagacaacccgtacctcaagtacaaccacgccgacgcggagtttcaggagcgtcttaaagaagatacgtcttttgggggcaacctcggacgagcagtattccaggcgaaaaagagggttcttgaacctctgggcctggttgaggagcctgttaagacggctccgggaaaaaagaggccggtagagcactctcctgtggagccagactcctcctcgggaaccggaaaagcgggccagcagcctgcaagaaaaagattgaattttggtcagactggagacgcagactccgtacctgacccccagcctctcggacagccaccagcagcccccacaagtttgggatctactacaatggctacaggcagtggcgcaccaatggcagacaataacgagggtgccgatggagtgggtaattcctcaggaaattggcattgcgattcccaatggctgggcgacagagtcatcaccaccagcacccgaacctgggccctgcccacctacaacaaccacctctacaagcaaatctccagccaatcaggagcatcgaacgacaaccactactttggccacagcaccccttgggggtattttgacttcaacagattccactgtcacttctccccacgtgactggcaaagactcatcaacaacaactggggattccgacccaagagactcaacttcaagctctttaacattcaagtcaaagaggtcacgcagaatgacggtacgacgacgattgccaataaccttaccagcacggttcaggtgtttactgactcggagtaccagctcccgtacgtcctcggctcggcgcatcaaggatgcctcccgccgttcccagcagacgtcttcatggtcccacagtatggatacctcaccctgaacaacgggagtcaggcggtaggacgctcttccttttactgcctggagtactttccttctcagatgcttcgtaccggaaacaactttaccttcagctacacctttgaagacgcgcctttccacagtagctacgctcacagccagagtctggatcggctgatgaatcctcttatcgaccagtacctgtattatctaaacaaaacaaacaatcaaagtggaaccttcacgcagtctcggctactgtttagtcaagctggacccaccagcattctcttcaagtctaaaaactggctgcctggaccttgctacagacaacagcgtctgtcaaagacagcaaacgacaacaacaacagcaactttccctggactgcggctacaaagtatcatctaaatggccgggactcgttggttaatccaggaccagctatggccagccacaaagacgatgaagaaaagttttttccccagcatggaaccctgatatttggtaaacaaggaacaaagctaacagacgcggatttggacaatgtcatgattacagatgaagaagaaatccgcaccaccaatcccgtggctacggagcagtacgggactgtgtcaaataatttgcagaaactcaacatactggcaactactggaactgtcaacacacaaggagcgttacctggtatggtgtggcaggatcgagacgtgtacctgcagggacccatttgggccaagattcctcacaccgatggacactttcatccttctccactgatgggaggttttggactcaaacacccgcctcctcagatcatgatcaaaaacactcccgttccagccaatcctcctacaaacttcagttctgccaagtttgcttccttcatcacacagtattccacgggacaagtcagcgtggagattgagtgggagctgcagaaggagaacagcaaacgctggaaccccgagatccagtacacttccaactacaacaaatctgttaatgtggactttactgtggacactaatggcgtgtattcagagcctcgccccattggcaccagatacctgactcgtaatctgtaa

SEQ ID NO: 2219 - DNA, 2208 bp, Artificial Sequence
  Synthetic Polynucleotide
atggctgccgatggttatcttccagattggctcgaggacactctctctgaaggaataagacagtggtggaagctcaaacctggcccaccaccgccaaagcccgcagagcggcacaaggacgccagtaggggtcttgtgcttcctgggtacaagtacctcggacccttcaacggactcgacaaaggagagccggtcaacgaggcagacgccgcggccctcgagcacgacaaggcctacgaccggcagctcgacagcggagacaacccgtacctcaagtacaaccacgccgacgcggagtttcaggagcgtcttaaagaagatacgtcttttgggggcaacctcggacgagcagtattccaggcgaaaaagagggttcttgaacctctgggcctggttgaggagcctgttaagacggctccgggaaaaaagaggccggtagagcactctcctgtggagccagactcctcctcgggaaccggaaaagcgggccagcagcctgcaagaaaaagattgaattttggtcagactggagacgcagactccgtacctgacccccagcctctcggacagccaccagcagcccccacaagtttgggatctactacaatggctacaggcagtggcgcaccaatggcagacaataacgagggtgccgatggagtgggtaattcctcaggaaattggcattgcgattcccaatggctgggcgacagagtcatcaccaccagcacccgaacctgggccctgcccacctacaacaaccacctctacaagcaaatctccagccaatcaggagcatcgaacgacaaccactactttggctacagcaccccttgggggtattttgacttcaacagattccactgtcacttctccccacgtgactggcaaagactcatcaacaacaactggggattccgacccaagagactcaacttcaagctctttaacattcaagtcaaagaggtcacgcagaatgacggtacgacgacgattgccaataaccttaccagcacggttcaggtgtttactgactcggagtaccagctcccgtacgtcctcggctcggcgcatcaaggatgcctcccgccgttcccagcagacgtcttcatggtcccacagtatggatacctcaccctgaacaacgggagtcaggcggtaggacgctcttccttttactgcctggagtactttccttctcagatgcttcgtaccggaaacaactttaccttcagctacacctttgaagacgtgcctttccacagtagctacgctcacagccagagtctggatcggctgatgaatcctcttatcgaccagtacctgtattatctaaacaaaacaaacaatcaaagtggaaccttcacgcagtctcggctactgtttagtcaagctggacccaccagcattctcttcaagtctaaaaactggctgcctggaccttgctacagacaacagcgtctgtcaaagacagcaaacgacaacaacaacagcaactttccctggactgcggctacaaagtatcatctaaatggccgggactcgttggttaatccaggaccagctatggccagccacaaagacgatgaagaaaagttttttcccatgcatggaaccctgatatttggtaaacaaggaacaaagctaacagacgcggatttggacaatgtcatgattacagatgaagaagaaatccgcaccaccaatcccgtggctacggagcagtacgggactgtgtcaaataatttgcagaaactcaacatactggcaactactggaactgtcaacacacaaggagcgttacctggtatggtgtggcaggatcgagacgtgtacctgcagggacccatttgggccaagattcctcacaccgatggacactttcatccttctccactgatgggaggttttggactcaaacacccgcctcctcagatcatgatcaaaaacactcccgttccagccaatcctcctacaaacttcagttctgccaagtttgcttccttcatcacacagtattccacgggacaagtcagcgtggagattgagtgggagctgcagaaggagaacagcaaacgctggaaccccgagatccagtacacttccaactacaacaaatctgttaatgtggactttactgtggacactaatggcgtgtattcagagcctcgccccattggcaccagatacctgactcgtaatctgtaa

SEQ ID NO: 2220 - DNA, 2208 bp, Artificial Sequence
  Synthetic Polynucleotide
atggctgccgatggttatcttccagattggctcgaggacactctctctgaaggaataagacagtggtggaagctcaaacctggcccaccaccaccaaagcccgcagagcggcataaggacgacagcaggggtcttgtgcttcctgggtacaagtacctcggacccttcaacggactcgacaagggagagccggtcaacgaggcagacgccgcggccctcgagcacgacaaagcctacgaccggcagctcgacagcggagacaacccgtacctcaagtacaaccacgccgacgcggagtttcaggagcgccttaaagaagatacgtcttttgggggcaacctcggacgagcagtcttccaggcgaaaaagagggttcttgaacctctgggcctggttgaggaacctgttaagacggctccgggaaaaaagaggccggtagagcactctcctgtggagccagactcctcctcgggaaccggaaaggcgggccagcagcctgcaagaaaaagattgaattttggtcagactggagacgcagactcagtacctgacccccagcctctcggacagccaccagcagccccctctggtctgggaactaatacgatggctacaggcagtggcgcaccaatggcagacaataacgagggcgccgacggagtgggtaattcctcgggaaattggcattgcgattccacatggatgggcgacagagtcatcaccaccagcacccgaacctgggccctgcccacctacaacaaccacctctacaagcaaatctccagccaatcaggagcatcgaacgacaaccactactttggctacagcaccccttgggggtattttgacttcaacagattccactgtcacttctccccacgtgactggcaaagactcatcaacaacaactggggattccgacccaagagactcaacttcaagctctttaacattcaagtcaaagaggtcacgcagaatgacggtacgacgacgattgccaataaccttaccagcacggttcaggtgtttactgactcggagtaccagctcccgtacgtcctcggctcggcgcatcaaggatgcctcccgccgttcccagcagacgtcttcatggtcccacagtatggatacctcaccctgaacaacgggagtcaggcggtaggacgctcttccttttactgcctggagtactttccttctcagatgcttcgtaccggaaacaactttaccttcagctacacctttgaagacgtgcctttccacagtagctacgctcacagccagagtctggatcggctgatgaatcctcttatcgaccagtacctgtattatctaaacaaaacaaacaatcaaagtggaaccttcacgcagtctcggctactgtttagtcaagctggacccaccagcattctcttcaagtctaaaaactggctgcctggaccttgctacagacaacagcgtctgtcaaagacagcaaacgacaacaacaacagcaactttccctggactgcggctacaaagtatcatctaaatggccgggactcgttggttaatccaggaccagctatggccagccacaaagacgatgaagaaaagttttttccccagcatggaaccctgatatttggtaaacaaggaacaaagctaacagacgcggatttggacaatgtcatgattacagatgaagaagaaatccgcaccaccaatcccgtggctacggagcagtacgggactgtgtcaaataatttgcagaaactcaacatactggcaactactggaactgtcaacacacaaggagcgttacctggtatggtgtggcaggatcgagacgtgtacctgcagggacccatttgggccaagattcctcacaccgatggacactttcatccttctccactgatgggaggttttggactcaaacacccgcctcctcagatcatgatcaaaaacactcccgttccagccaatcctcctacaaacttcagttctgccaagtttgcttccttcatcacacagtattccacgggacaagtcagcgtggagattgagtgggagctgcagaaggagaacagcaaacgctggaaccccgagatccagtacacttccaactacaacaaatctgttaatgtggactttactgtggacactaatggcgtgtattcagagcctcgccccattggcaccagatacctgactcgtaatctgtaa

SEQ ID NO: 2221 - DNA, 2208 bp, Artificial Sequence
  Synthetic Polynucleotide
atggctgccgatggttatcttccagattggctcgaggacactctctctgaaggaataagacagtggtggaagctcaaacctggcccaccaccgccaaagcccgcagagcggcacaaggacgacagtaggggtcttgtgcttcctgggtacaagtacctcggacccttcaacggactcgacaaaggagagccggtcaacgaggcagacgccgcggccctcgagcacgacaaggcctacgaccggcagctcgacagcggagacaacccgtacctcaagtacaaccacgccgacgcggagtttcaggagcgtcttaaagaagatacgtcttttgggggcaacctcggacgagcagtattccaggcgaaaaagagggttcttgaacctctgggcctggttgaggagcctgttaagacggctccgggaaaaaagaggccggtagagcactctcctgtggagccagactcctcctcgggaaccggaaaagcgggccagcagcctgcaagaaaaagattgaattttggtcagactggagacgcagactccgtacctgacccccagcctctcggacagccaccagcagcccccacaagtttgggatctactacaatggctacaggcagtggcgcaccaatggcagacaataacgagggtgccgatggagtgggtaattcctcaggaaattggcattgcgattcccaatggctgggcgacagagtcatcaccaccagcacccgaacctgggccctgcccacctacaacaaccacctctacaagcaaatctccagccaatcaggagcatcgaacgacaaccactactttggccacagcaccccttgggggtattttgacttcaacagattccactgtcacttctccccacgtgactggcaaagactcatcaacaacaactggggattccgacccaagagactcaacttcaagctctttaacattcaagtcaaagaggtcacgcagaatgacggtacgacgacgattgccaataaccttaccagcacggttcaggtgtttactgactcggagtaccagctcccgtacgtcctcggctcggcgcatcaaggatgcctcccgccgttcccagcagacgtcttcatggtcccacagtatggatacctcaccctgaacaacgggagtcaggcggtaggacgctcttccttttactgcctggagtactttccttctcagatgcttcgtaccggaaacaactttaccttcagctacacctttgaagacgtgcctttccacagtagctacgctcacagccagagtctggatcggctgatgaatcctcttatcgaccagtacctgtattatctaaacaaaacaaacaatcaaagtggaaccttcacgcagtctcggctactgtttagtcaagctggacccaccagcattctcttcaagtctaaaaactggctgcctggaccttgctacagacaacagcgtctgtcaaagacagcaaacgacaacaacaacagcaactttccctggactgcggctacaaagtatcatctaaatggccgggactcgttggttaatccaggaccagctatggccagccacaaagacgatgaagaaaagttttttcccatgcatggaaccctgatatttggtaaacaaggaacaaagctaacagacgcggatttggacaatgtcatgattacagatgaagaagaaatccgcaccaccaatcccgtggctacggagcagtacgggactgtgtcaaataatttgcagaaactcaacatactggcaactactggaactgtcaacacacaaggagcgttacctggtatggtgtggcaggatcgagacgtgtacctgcagggacccatttgggccaagattcctcacaccgatggacactttcatccttctccactgatgggaggttttggactcaaacacccgcctcctcagatcatgatcaaaaacactcccgttccagccaatcctcctacaaacttcagttctgccaagtttgcttccttcatcacacagtattccacgggacaagtcagcgtggagattgagtgggagctgcagaaggagaacagcaaacgctggaaccccgagatccagtacacttccaactacaacaaatctgttaatgtggactttactgtggacactaatggcgtgtattcagagcctcgccccattggcaccagatacctgactcgtaatctgtaa

SEQ ID NO: 2222 - DNA, 2208 bp, Artificial Sequence
  Synthetic Polynucleotide
atggctgccgatggttatcttccagattggctcgaggacactctctctgaaggaataagacagtggtggaagctcaaacctggcccaccaccgccaaagcccgcagagcggcacaaggacgacagtaggggtcttgtgcttcctgggtacaagtacctcggacccttcaacggactcgacaaaggagagccggtcaacgaggcagacgccgcggccctcgagcacgacaaggcctacgaccggcagctcgacagcggagacaacccgtacctcaagtacaaccacgccgacgcggagtttcaggagcgtcttaaagaagatacgtcttttgggggcaacctcggacgagcagtattccaggcgaaaaagagggttcttgaacctctgggcctggttgaggagcctgttaagacggctccgggaaaaaagaggccggtagagcactctcctgtggagccagactcctcctcgggaaccggaaaagcgggccagcagcctgcaagaaaaagattgaattttggtcagactggagacgcagactccgtacctgacccccagcctctcggacagccaccagcagcccccacaagtttgggatctactacaatggctacaggcagtggcgcaccaatggcagacaataacgagggtgccgatggagtgggtaattcctcaggaaattggcattgcgattcccaatggctgggcgacagagtcatcaccaccagcacccgaacctgggccctgcccacctacaacaaccacctctacaagcaaatctccagccaatcaggagcatcgaacgacaaccactactttggctacagcaccccttgggggtattttgacttcaacagattccactgtcacttctccccacgtgactggcaaagactcatcaacaacaactggggattccgacccaagagactcaacttcaagctctttaacattcaagtcaaagaggtcacgcagaatgacggtacgacgacgattgccaataaccttaccagcacggttcaggtgtttactgactcggagtaccagctcccgtacgtcctcggctcggcgcatcaaggatgcctcccgccgttcccagcagacgtcttcatggtcccacagtatggatacctcaccctgaacaacgggagtcaggcggtaggacgctcttccttttactgcctggagtactttccttctcagatgcttcgtaccggaaacaactttaccttcagctacacctttgaagacgtgcctttccacagtagctacgctcacagccagagtctggatcggctgatgaatcctcttatcgaccagtacctgtattatctaaacaaaacaaacaatcaaagtggaaccttcacgcagtctcggctactgtttagtcaagctggacccaccagcattctcttcaagtctaaaaactggctgcctggaccttgctacagacaacagcgtctgtcaaagacagcaaacgacaacaacaacagcaactttccctggactgcggctacaaagtatcatctaaatggccgggactcgttggttaatccaggaccagctatggccagccacaaagacgatgaagaaaagttttttccccagcatggaaccctgatatttggtaaacaaggaacaaagctaacagacgcggatttggacaatgtcatgattacagatgaagaagaaatccgcaccaccaatcccgtggctacggagcagtacgggactgtgtcaaataatttgcagaaactcaacatactggcaactactggaactgtcaacacacaaggagcgttacctggtatggtgtggcaggatcgagacgtgtacctgcagggacccatttgggccaagattcctcacaccgatggacactttcatccttctccactgatgggaggttttggactcaaacacccgcctcctcagatcatgatcaaaaacactcccgttccagccaatcctcctacaaacttcagttctgccaagtttgcttccttcatcacacagtattccacgggacaagtcagcgtggagattgagtgggagctgcagaaggagaacagcaaacgctggaaccccgagatccagtacacttccaactacaacaaatctgttaatgtggactttactgtggacactaatggcgtgtattcagagcctcgccccattggcaccagatacctgactcgtaatctgtaa

SEQ ID NO: 2223 - DNA, 2208 bp, Artificial Sequence
  Synthetic Polynucleotide
atggctgccgatggttatcttccagattggctcgaggacactctctctgaaggaataagacagtggtggaagctcaaacctggcccaccaccgccaaagcccgcagagcggcacaaggacgccagtaggggtcttgtgcttcctgggtacaagtacctcggacccttcaacggactcgacaaaggagagccggtcaacgaggcagacgccgcggccctcgagcacgacaaggcctacgaccggcagctcgacagcggagacaacccgtacctcaagtacaaccacgccgacgcggagtttcaggagcgtcttaaagaagatacgccttttgggggcaacctcggacgagcagtattccaggcgaaaaagagggttcttgaacctctgggcctggttgaggagcctgttaagacggctccgggaaaaaagaggccggtagagcactctcctgtggagccagactcctcctcgggaaccggaaaagcgggccagcggcctgcaagaaaaagattgaattttggtcagactggagacgcagactccgtacctgacccccagcctctcggacagccaccagcagcccccacaagtttgggatctactacaatggctacaggcagtggcgcaccaatggcagacaataacgagggtgccgatggagtgggtaattcctcaggaaattggcattgcgattcccaatggctgggcgacagagtcatcaccaccagcacccgaacctgggccctgcccacctacaacaaccacctctacaagcaaatccccagccaatcaggagcatcgaacgacaaccactactttggctacagcaccccttgggggtattttgacttcaacagattccactgtcacttctccccacgtgactggcaaagactcatcaacaacaactggggattccgacccaagagactcaacttcaagctctttaacattcaagtcaaagaggtcacgcagaatgacggtacgacgacgattgccaataaccttaccagcacggttcaggtgtttactgactcggagtaccagctcccgtacgtcctcggctcggcgcatcaaggatgcctcccgccgttcccagcagacgtcttcatggtcccacagtatggatacctcaccctgaacaacgggagtcaggcggtaggacgctcttccttttactgcctggagtactttccttctcagatgcttcgtaccggaaacaactttaccttcagctacacctttgaagacgtgcctttccacagtagctacgctcacagccagagtctggatcggctgatgaatcctcttatcgaccagtacctgtattatctaaacaaaacaaacaatcaaagtggaaccttcacgcagtctcggctactgtttagtcaagctggacccaccagcattctcttcaagtctaaaaactggctgcctggaccttgctacagacaacagcgtctgtcaaagacagcaaacgacaacaacaacagcaactttccctggactgcggctacaaagtatcatctaaatggccgggactcgttggttaatccaggaccagctatggccagccacaaagacgatgaagaaaagttttttccccaacatggaaccctgatatttggtaaacaaggaacaaagctaacagacgcggatttggacaatgtcatgattacagatgaagaagaaatccgcaccaccaatcccgtggctacggagcagtacgggactgtgtcaaataatttgcagaaactcaacatactggcaactactggaactgtcaacacacaaggagcgttacctggtatggtgtggcaggatcgagacgtgtacctgcagggacccatttgggccaagattcctcacaccgatggacactttcatccttctccactgatgggaggttttggactcaaacacccgcctcctcagatcatgatcaaaaacactcccgttccagccaatcctcctacaaacttcagttctgccaagtttgcttccttcatcacacagtattccacgggacaagtcagcgtggagattgagtgggagctgcagaaggagaacagcaaacgctggaaccccgagatccagtacacttccaactacaacaaatctgttaatgtggactttactgtggacactaatggcgtgtattcagagcctcgccccattggcaccagatacctgactcgtaatctgtaa

SEQ ID NO: 2224 - DNA, 2208 bp, Artificial Sequence
  Synthetic Polynucleotide
atggctgccgatggttatcttccagattggctcgaggacactctctctgaaggaataagacagtggtggaagctcaaacctggcccaccaccaccaaagcccgcagagcggcataaggacgacagcaggggtcttgtgcttcctgggtacaagtacctcggacccttcaacggactcgacaagggagagccggtcaacgaggcagacgccgcggccctcgagcacgacaaagcctacgaccggcagctcgacagcggagacaacccgtacctcaagtacaaccacgccgacgcggagtttcaggagcgccttaaagaagatacgtcttttgggggcaacctcggacgagcagtcttccaggcgaaaaagagggttcttgaacctctgggcctggttgaggaacctgttaagacggctccgggaaaaaagaggccggtagagcactctcctgtggagccagactcctcctcgggaaccggaaaggcgggccagcagcctgcaagaaaaagattgaattttggtcagactggagacgcagactcagtacctgacccccagcctctcggacagccaccagcagccccctctggtctgggaactaatacgatggctacaggcagtggcgcaccaatggcagacaataacgagggcgccgacggagtgggtaattcctcgggaaattggcattgcgattccacatggatgggcgacagagtcatcaccaccagcacccgaacctgggccctgcccacctacaacaaccacctctacaaacaaatttccagccaatcaggagcctcgaacgacaatcactactttggctacagcaccccttgggggtattttgacttcaacagattccactgccacttttcaccacgtgactggcaaagactcatcaacaacaactggggattccgacccaagagactcaacttcaagctctttaacattcaagtcaaagaggtcacgcagaatgacggtacgacgacgattgccaataaccttaccagcacggttcaggtgtttactgactcggagtaccagctcccgtacgtcctcggctcggcgcatcaaggatgcctcccgccgttcccagcagacgtcttcatggtcccacagtatggatacctcaccctgaacaacgggagtcaggcggtaggacgctcttccttttactgcctggagtactttccttctcagatgcttcgtaccggaaacaactttaccttcagctacacctttgaagacgcgcctttccacagtagctacgctcacagccagagtctggatcggctgatgaatcctcttatcgaccagtacctgtattatctaaacaaaacaaacaatcaaagtggaaccttcacgcagtctcggctactgtttagtcaagctggacccaccagcattctcttcaagtctaaaaactggctgcctggaccttgctacagacaacagcgtctgtcaaagacagcaaacgacaacaacaacagcaactttccctggactgcggctacaaagtatcatctaaatggccgggactcgttggttaatccaggaccagctatggccagccacaaagacgatgaagaaaagttttttccccagcatggaaccctgatatttggtaaacaaggaacaaagctaacagacgcggatttggacaatgtcatgattacagatgaagaagaaatccgcaccaccaatcccgtggctacggagcagtacgggactgtgtcaaataatttgcagaaactcaacatactggcaactactggaactgtcaacacacaaggagcgttacctggtatggtgtggcaggatcgagacgtgtacctgcagggacccatttgggccaagattcctcacaccgatggacactttcatccttctccactgatgggaggttttggactcaaacacccgcctcctcagatcatgatcaaaaacactcccgttccagccaatcctcctacaaacttcagttctgccaagtttgcttccttcatcacacagtattccacgggacaagtcagcgtggagattgagtgggagctgcagaaggagaacagcaaacgctggaaccccgagatccagtacacttccaactacaacaaatctgttaatgtggactttactgtggacactaatggcgtgtattcagagcctcgccccattggcaccagatacctgactcgtaatctgtaa

SEQ ID NO: 2225 - DNA, 2208 bp, Artificial Sequence
  Synthetic Polynucleotide
atggctgccgatggttatcttccagattggctcgaggacattctctctgaaggaataagacagtggtggaagctcaaacctggcccaccaccgccaaagcccgcagagcggcacaaggacgccagtaggggtcttgtgcttcctgggtacaagtacctcggacccttcaacggactcgacaaaggagagccggtcaacgaggcagacgccgcggccctcgagcacgacaaggcctacgaccggcagctcgacagcggagacaacccgtacctcaagtacaaccacgccgacgcggagtttcaggagcgtcttaaagaagatacgtcttttgggggcaacctcggacgagcagtattccaggcgaaaaagagggttcttgaacctctgggcctggttgaggagcctgttaagacggctccgggaaaaaagaggccggtagagcactctcctgtggagccagactcctcctcgggaaccggaaaagcgggccagcagcctgcaagaaaaagattgaattttggtcagactggagacgcagactccgtacctgacccccagcctctcggacagccaccagcagcccccacaagtttgggatctactacaatggctacaggcagtggcgcaccaatggcagacaataacgagggtgccgatggagtgggtaattcctcaggaaattggcattgcgattcccaatggctgggcgacagagtcatcaccaccagcacccgaacctgggccctgcccacctacaacaaccacctctacaagcaaatctccagccaatcaggagcatcgaacgacaaccactactttggctacagcaccccttgggggtattttgacttcaacagattccactgtcacttctccccacgtgactggcaaagactcatcaacaacaactggggattccgacccaagagactcaacttcaagctctttaacattcaagtcaaagaggtcacgcagaatgacggtacgacgacgattgccaataaccttaccagcacggttcaggtgtttactgactcggagtaccagctcccgtacgtcctcggctcggcgcatcaaggatgcctcccgccgttcccagcagacgtcttcatggtcccacagtatggatacctcaccctgaacaacgggagtcaggcggtaggacgctcttccttttactgcctggagtactttccttctcagatgcttcgtaccggaaacaactttaccttcagctacacctttgaagacgtgcctttccacagtagctacgctcacagccagagtctggatcggctgatgaatcctcttatcgaccagtacctgtattatctaaacaaaacaaacaatcaaagtggaaccttcacgcagtctcggctactgtttagtcaagctggacccaccagcattctcttcaagtctaaaaactggctgcctggaccttgctacagacaacagcgtctgtcaaagacagcaaacgacaacaacaacagcaactttccctggactgcggctacaaagtatcatctaaatggccgggactcgttggttaatccaggaccagctatggccagccacaaagacgatgaagaaaagttttttccccagcatggaaccctgatatttggtaaacaaggaacaaagctaacagacgcggatttggacaatgtcatgattacagatgaagaagaaatccgcaccaccaatcccgtggctacggagcagtacgggactgtgtcaaataatttgcagaaactcaacatactggcaactactggaactgtcaacacacaaggagcgttacctggtatggtgtggcaggatcgagacgtgtacctgcagggacccatttgggccaagattcctcacaccgatggacactttcatccttctccactgatgggaggttttggactcaaacacccgcctcctcagatcatgatcaaaaacactcccgttccagccaatcctcctacaaacttcagttctgccaagtttgcttccttcatcacacagtattccacgggacaagtcagcgtggagattgagtgggagctgcagaaggagaacagcaaacgctggaaccccgagatccagtacacttccaactacaacaaatctgttaatgtggactttactgtggacactaatggcgtgtattcagagcctcgccccattggcaccagatacctgactcgtaatctgtaa

SEQ ID NO: 2226 - DNA, 2208 bp, Artificial Sequence
  Synthetic Polynucleotide
atggctgccgatggttatcttccagattggctcgaggacattctctctgaaggaataagacagtggtggaagctcaaacctggcccaccaccgccaaagcccgcagagcggcacaaggacgccagtaggggtcttgtgcttcctgggtacaagtacctcggacccttcaacggactcgacaaaggagagccggtcaacgaggcagacgccgcggccctcgagcacgacaaggcctacgaccggcagctcgacagcggagacaacccgtacctcaagtacaaccacgccgacgcggagtttcaggagcgtcttaaagaagatacgtcttttgggggcaacctcggacgagcagtattccaggcgaaaaagagggttcttgaacctctgggcctggttgaggagcctgttaagacggctccgggaaaaaagaggccggtagagcactctcctgtggagccagactcctcctcgggaaccggaaaagcgggccagcagcctgcaagaaaaagattgaattttggtcagactggagacgcagactccgtacctgacccccagcctctcggacagccaccagcagcccccacaagtttgggatctactacaatggctacaggcagtggcgcaccaatggcagacaataacgagggtgccgatggagtgggtaattcctcaggaaattggcattgcgattcccaatggctgggcgacagagtcatcgccaccagcacccgaacctgggccctgcccacctacaacaaccacctctacaagcaaatctccagccaatcaggagcatcgaacgacaaccactactttggctacagcaccccttgggggtattttgacttcaacagattccactgtcacttctccccacgtgactggcaaagactcatcaacaacaactggggattccgacccaagagactcaacttcaagctctttaacattcaagtcaaagaggtcacgcagaatgacggtacgacgacgattgccaataaccttaccagcacggttcaggtgtttactgactcggagtaccagctcccgtacgtcctcggctcggcgcatcaaggatgcctcccgccgttcccagcagacgtcttcatggtcccacagtatggatacctcaccctgaacaacgggagtcaggcggtaggacgctcttccttttactgcctggagtactttccttctcagatgcttcgtaccggaaacaactttaccttcagctacacctttgaagacgtgcctttccacagtagctacgctcacagccagagtctggatcggctgatgaatcctcttatcgaccagtacctgtattatctaaacaaaacaaacaatcaaagtggaaccttcacgcagtctcggctactgcttagtcaagctggacccaccagcattctcttcaagtctaaaaactggctgcctggaccttgctacagacaacagcgtctgtcaaagacagcaaacgacaacaacaacagcaactttccctggactgcggctacaaagtatcatctaaatggccgggactcgttggttaatccaggaccagctatggccagccacaaagacgatgaagaaaagttttttccccaacatggaaccctgatatttggtaaacaaggaacaaagctaacagacgcggatttggacaatgtcatgattacagatgaagaagaaatccgcaccaccaatcccgtggctacggagcagtacgggactgtgtcaaataatttgcagaaactcaacatactggcaactactggaactgtcaacacacaaggagcgttacctggtatggtgtggcaggatcgagacgtgtacctgcagggacccatttgggccaagattcctcacaccgatggacactttcatccttctccactgatgggaggttttggactcaaacacccgcctcctcagatcatgatcaaaaacactcccgttccagccaatcctcctacaaacttcagttctgccaagtttgcttccttcatcacacagtattccacgggacaagtcagcgtggagattgagtgggagctgcagaaggagaacagcaaacgctggaaccccgagatccagtacacttccaactacaacaaatctgttaatgtggactttactgtggacactaatggcgtgtattcagagcctcgccccattggcaccagatacctgactcgtaatctgtaa

SEQ ID NO: 2227 - DNA, 2208 bp, Artificial Sequence
  Synthetic Polynucleotide
atggctgccgatggttatcttccagattggctcgaggacactctctctgaaggaataagacagtggtggaagctcaaacctggcccaccaccgccaaagcccgcagagcggcacaaggacgccagtaggggtcttgtgcttcctgggtacaagtacctcggacccttcaacggactcgacaaaggagagccggtcaacgaggcagacgccgcggccctcgagcacgacaaggcctacgaccggcagctcgacagcggagacaacccgtacctcaagtacaaccacgccgacgcggagtttcaggagcgtcttaaagaagatacgccttttgggggcaacctcggacgagcagtattccaggcgaaaaagagggttcttgaacctctgggcctggttgaggagcctgttaagacggctccgggaaaaaagaggccggtagagcactctcctgtggagccagactcctcctcgggaaccggaaaagcgggccagcagcctgcaagaaaaagattgaattttggtcagactggagacgcagactccgtacctgacccccagcctctcggacagccaccagcagcccccacaagtttgggatctactacaatggctacaggcagtggcgcaccaatggcagacaataacgagggtgccgatggagtgggtaattcctcaggaaattggcattgcgattcccaatggctgggcgacagagtcatcaccaccagcacccgaacctgggccctgcccacctacaacaaccacctctacaagcaaatccccagccaatcaggagcatcgaacgacaaccactactttggctacagcaccccttgggggtattttgacttcaacagattccactgtcacttctccccacgtgactggcaaagactcatcaacaacaactggggattccgacccaagagactcaacttcaagctctttaacattcaagtcaaagaggtcacgcagaatgacggtacgacgacgattgccaataaccttaccagcacggttcaggtgtttactgactcggagtaccagctcccgtacgtcctcggctcggcgcatcaaggatgcctcccgccgttcccagcagacgtcttcatggtcccacagtatggatacctcaccctgaacaacgggagtcaggcggtaggacgctcttccttttactgcctggagtactttccttctcagatgcttcgtaccggaaacaactttaccttcagctacacctttgaagacgtgcctttccacagtagctacgctcacagccagagtctggatcggctgatgaatcctcttatcgaccagtacctgtattatctaaacaaaacaaacaatcaaagtggaaccttcacgcagtctcggctactgtttagtcaagctggacccaccagcattctcttcaagtctaaaaactggctgcctggaccttgctacagacaacagcgtctgtcaaagacagcaaacgacaacaacaacagcaactttccctggactgcggctacaaagtatcatctaaatggccgggactcgttggttaatccaggaccagctatggccagccacaaagacgatgaagaaaagttttttccccaacatggaaccctgatatttggtaaacaaggaacaaagctaacagacgcggatttggacaatgtcatgattacagatgaagaagaaatccgcaccaccaatcccgtggctacggagcagtacgggactgtgtcaaataatttgcagaaactcaacatactggcaactactggaactgtcaacacacaaggagcgttacctggtatggtgtggcaggatcgagacgtgtacctgcagggacccatttgggccaagattcctcacaccgatggacactttcatccttctccactgatgggaggttttggactcaaacacccgcctcctcagatcatgatcaaaaacactcccgttccagccaatcctcctacaaacttcagttctgccaagtttgcttccttcatcacacagtattccacgggacaagtcagcgtggagattgagtgggagctgcagaaggagaacagcaaacgctggaaccccgagatccagtacacttccaactacaacaaatctgttaatgtggactttactgtggacactaatggcgtgtattcagagcctcgccccattggcaccagatacctgactcgtaatctgtaa

SEQ ID NO: 2228 - DNA, 2208 bp, Artificial Sequence
  Synthetic Polynucleotide
atggctgccgatggttatcttccagattggctcgaggacactctctctgaaggaataagacagtggtggaagctcaaacctggcccaccaccaccaaagcccgcagagcggcataaggacgacagcaggggtcttgtgcttcctgggtacaagtacctcggacccttcaacggactcgacaagggagagccggtcaacgaggcagacgccgcggccctcgagcacgacaaagcctacgaccggcagctcgacagcggagacaacccgtacctcaagtacaaccacgccgacgcggagtttcaggagcgccttaaagaagatacgtcttttgggggcaacctcggacgagcagtcttccaggcgaaaaagagggttcttgaacctctgggcctggttgaggaacctgttaagacggctccgggaaaaaagaggccggtagagcactctcctgtggagccagactcctcctcgggaaccggaaaggcgggccagcagcctgcaagaaaaagattgaawtttggtcagactggagacgcagactcagtacctgacccccagcctctcggacagccaccagcagccccctctggtctsggaactaatacgatggctacaggcagtggcgcaccaatggcagacaataacgagggcgccgacgkagtgggtaattcctcgggaaattggcattgcgattccacatggatgggcgacagagtcatcaccaccagcacccgaacctgggccctgcccacctacaacaaccacctctacaaacaaatttccagccaatcaggagcctcgaacgacaatcactactttggctacagcaccccttgggggtattttgacttcaacagattccactgccacttttcaccacgtgactggcaaagactcatcaacaacaactggggattccgacccaagagactcaacttcaagctctttaacattcaagtcaaagaggtcacgcagaatgacggtacgacgacgattgccaataaccttaccagcacggttcaggtgtttactgactcggagtaccagctcccgtacgtcctcggctcggcgcatcaaggatgcctcccgccgttcccagyagacgtcttcatggtgccacagtatggatacctcaccctgaacaacgggagtcaggcagtaggacgctcttcattttactgcctggagtactttccttctcagatgctgcgtaccggaaacaactttaccttcagctacacttttgaggacgttcctttccacagcagctacgctcacagccagagtctggaycgkctsatgaatcctctyatcgaccagtacctgtattatctaaacaaaacaaacaatcaaagtggaaccttcacgcagtctcggctactgtttagtcaagctggacccaccagcattctcttcaagtctaaaaactggctgcctggaccttgctacagacaacagcgtctgtcaaagacagcaaacgacaacaacaacagcaamtttccctggactgcggctacaaagtatcatctaaatggccgggactcgttggttaatccaggaccagctatggccagccacaaagacgatgaagaaaagttttttcccatgcatggaaccytgatatttggtaaacaaggaacaaagctaacagacgcggatttggacaatgtcrtgattacagatgaagaagaaatccgcaccaccaatcccgtggctacggagcagtacgggactgtgtcaaataatttgcagaaactcaacatactgscaactactggaactgtcaacwcacaaggagcgttacctggtatggtgtggcaggatcgagacgtgtacctgcagggacccatttgggccaagattcctcacaccgatggacactttcacccttctccactgatgggaggttttggactcaaacacccgcctcctcagatcatgatcaaaaacactccsgttccagcsaatcctcctacaaacttcagttatgcaaagtttgcttccttcatcacacagtattccacgggacaagtcagcgtggagatggagtgggagctgcagaaggagaacagcaaacgctggaaccccgagattccatacacttccaaatacaacaaatctgttaatgtggactttactgtggacactaatggcgtgtattcagagcctcgccccattggcacccgatacctgactcgtaatctgtaa

SEQ ID NO: 2229 - DNA, 2208 bp, Artificial Sequence
  Synthetic Polynucleotide
atggctgccgatggttatcttccagattggctcgaggacactctctctgaaggaataagacagtggtggaagctcaaacctggcccaccaccaccaaagcccgcagagcggcatcaggacgacagcaggggtcttgtgcttcctgggtacaagtacctcggacccttcaacggactcgacaaaggagagccggtcaacgaggcagacgctgcggccctcgagcacgacaaggcctacgaccggcagctcgacagcggagacaacccgtacctcaagtacaaccacgccgacgcggagtttcaggagcgtcttaaagaagatacgtcttttgggggcaacctcggacgagcagtcttccaggcgaaaaagagggttcttgaacctctgggcctggttgaggaacctgttaagacggctccgggaaaaaagaggccggtagagcactctcctgcggagccagactcctcctcgggaaccggaaaagcgggccagcagcctgcaagaaagagattgaatttcggtcagactggagacgcagactccgtacctgacccccagcctctcggacagccaccagcagcccccacaagtttgggatctactacaatggctacaggcagtggcgcaccaatggcagacaataacgagggtgccgatggagtgggtaattcctcaggaaattggcattgcgattcccaatggctgggcgacagagtcatcaccaccagcacccgaacctgggccctgcccacctacaacaaccacctctacaagcaaatctccagccaatcaggagcatcgaacgacaaccactactttggctacagcaccccttgggggtattttgacttcaacagattccactgtcacttctccccacgtgactggcaaagactcatcaacaacaactggggattccgacccaagagactcaacttcaagctctttaacattcaagtcaaagaggtcacgcagaatgacggtacgacgacgattgccaataaccttaccagcacggttcaggtgtttactgactcggagtaccagctcccgtacgtcctcggctcggcgcatcaaggatgcctcccgccgtttccagcggacgtcttcatggtcccacagtatggatacctcaccctgaacaacgggagtcaggcggtaggacgctcttccttttactgcctggagtactttccttctcagatgctgcgtaccggaaacaactttaccttcagctacacctttgaggacgtgcctttccacagcagctacgctcacagccagagtttggaccggctgatgaatcctctgatcgaccagtatctgtattatctgaacaggacacaatcaaatagtggaactcttcagcagtctaggctactgtttagccaagctggacccaccagcatgtctcttcaagctaaaaactggctgcctggaccttgctacagacagcagcgtctgtcaaagcaggcaaacgacaacaacaacagcaactttccctggactgcggctacaaagtatcatctaaatggtcgggactcgttggttaatccaggaccagctatggccagccacaaagacgatgaagaaaagtttttccccatgcatggaaccctgatatttggtaaacaaggaacaaatgctaacgacgcggatttggaacatgtcatgattacagatgaagaagaaatcaggaccaccaatcccgtggctacagagcagtacggaaacgtgtcaaataatttgcaaaactcaaatactggtccaactacagaaaatgtcaatcaccagggagcgttacctggtatggtgtggcaggatcgagacgtgtacctgcagggacccatttgggccaagattcctcacaccgacggacactttcacccttctccactgatgggaggttttggactcaaacacccgcctcctcaaatcatgatcaaaaacactcctgttccagccaatcctcctacaaacttcagcgcggcaaagtttgcttccttcatcacacagtattccacgggacaggccagcgtggagatcgagtgggagctgcagaaggagaacagcaaacgctggaaccccgagatccagtacacttccaactacaacaaatctgttaatgtggactttactgtggacactaatggtgtgtattcagagcctcgccccattggcaccagatacctgactcgtaatctgtaa

SEQ ID NO: 2230 - DNA, 2208 bp, Artificial Sequence
  Synthetic Polynucleotide
atggctgccgatggttatcttccagattggctcgaggacactctctctgaaggaataagacagtggtggaagctcaaacctggcccaccaccgccaaagcccgcagagcggcacaaggacgacagtaggggtcttgtgcttcctgggtacaagtacctcggacccttcaacggactcgacaaaggagagccggtcaacgaggcagacgccgcggccctcgagcacgacaaggcctacgaccggcagctcgacagcggagacaacccgtacctcaagtacaaccacgccgacgcggagtttcaggagcgtcttaaagaagatacgtcttttgggggcaacctcggacgagcagtattccaggcgaaaaagagggttcttgaacctctgggcctggttgaggagcctgttaagacggctccgggaaaaaagaggccggtagagcactctcctgtggagccagactcctcctcgggaaccggaaaagcgggccagcagcctgcaagaaaaagattgaattttggtcagactggagacgcagactccgtacctgacccccagcctctcggacagccaccagcagcccccacaagtttgggatctactacaatggctacaggcagtggcgcaccaatggcagacaataacgagggtgccgatggagtgggtaattcctcaggaaattggcattgcgattcccaatggctgggcgacagagtcatcaccaccagcacccgaacctgggccctgcccacctacaacaaccacctctacaagcaaatctccagccaatcaggagcatcgaacgacaaccactactttggccacagcaccccttgggggtattttgacttcaacagattccactgtcacttctccccacgtgactggcaaagactcatcaacaacaactggggattccgacccaagagactcaacttcaagctctttaacattcaagtcaaagaggtcacgcagaatgacggtacgacgacgattgccaataaccttaccagcacggttcaggtgtttactgactcggagtaccagctcccgtacgtcctcggctcggcgcatcaaggatgcctcccgccgttcccagcagacgtcttcatggtcccacagtatggatacctcaccctgaacaacgggagtcaggcggtaggacgctcttccttttactgcctggagtactttccttctcagatgcttcgtaccggaaacaactttaccttcagctacacctttgaagacgtgcctttccacagtagctacgctcacagccagagtctggatcggctgatgaatcctcttatcgaccagtacctgtattatctaaacaaaacacaatcaaatagtggaactcttcagcagtctcggctactgtttagtcaagctggacccaccagcatgcctcttcaagctaaaaactggctgcctggaccttgctacagacaacagcgtctgtcaaagcaggcaaacgacaacaacaacagcaactttccctggactgcggctacaaagtatcatctaaatggccgggactcgttggttaatccaggaccagctatggccagccacaaagacgatgaagaaaagtttttccccatgcatggaaccctgatatttggtaaacaaggaacaaatgctaacgacgcggatttggacaatgtcatgattacagatgaagaagaaatccgcaccaccaatcccgtggctacggagcagtacgggactgtgtcaaataatttgcaaaactcaaatactggtccaactactggaactgtcaatcaccaaggagcgttacctggtatggtgtggcaggatcgagacgtgtacctgcagggacccatttgggccaagattcctcacaccgatggacactttcatccttctccactgatgggaggttttggactcaaacacccgcctcctcagatcatgatcaaaaacactcccgttccagccaatcctcctacaaacttcagttctgccaagtttgcttccttcatcacacagtattccacgggacaagtcagcgtggagattgagtgggagctgcagaaggagaacagcaaacgctggaaccccgagatccagtacacttccaactacaacaaatctgttaatgtggactttactgtggacactaatggcgtgtattcagagcctcgccccattggcaccagatacctgactcgtaatctgtaa

SEQ ID NO: 2231 - DNA, 2208 bp, Artificial Sequence
  Synthetic Polynucleotide
atggctgccgatggttatcttccagattggctcgaggacactctctctgaaggaataagacagtggtggaagctcaaacctggcccaccaccgccaaagcccgcagagcggcacaaggacgacagtaggggtcttgtgcttcctgggtacaagtacctcggacccttcaacggactcgacaaaggagagccggtcaacgaggcagacgccgcggccctcgagcacgacaaggcctacgaccggcagctcgacagcggagacaacccgtacctcaagtacaaccacgccgacgcggagtttcaggagcgtcttaaagaagatacgtcttttgggggcaacctcggacgagcagtattccaggcgaaaaagagggttcttgaacctctgggcctggttgaggagcctgttaagacggctccgggaaaaaagaggccggtagagcactctcctgtggagccagactcctcctcgggaaccggaaaagcgggccagcagcctgcaagaaaaagattgaattttggtcagactggagacgcagactccgtacctgacccccagcctctcggacagccaccagcagcccccacaagtttgggatctactacaatggctacaggcagtggcgcaccaatggcagacaataacgagggtgccgatggagtgggtaattcctcaggaaattggcattgcgattcccaatggctgggcgacagagtcatcaccaccagcacccgaacctgggccctgcccacctacaacaaccacctctacaagcaaatctccagccaatcaggagcatcgaacgacaaccactactttggccacagcaccccttgggggtattttgacttcaacagattccactgtcacttctccccacgtgactggcaaagactcatcaacaacaactggggattccgacccaagagactcaacttcaagctctttaacattcaagtcaaagaggtcacgcagaatgacggtacgacgacgattgccaataaccttaccagcacggttcaggtgtttactgactcggagtaccagctcccgtacgtcctcggctcggcgcatcaaggatgcctcccgccgttcccagcagacgtcttcatggtcccacagtatggatacctcaccctgaacaacgggagtcaggcggtaggacgctcttccttttactgcctggagtactttccttctcagatgcttcgtaccggaaacaactttaccttcagctacacctttgaagacgtgcctttccacagtagctacgctcacagccagagtctggatcggctgatgaatcctcttatcgaccagtacctgtattatctaaacaaaacacaatcaaatagtggaactcttcagcagtctcggctactgtttagtcaagctggacccaccagcatgtctcttcaagctaaaaactggctgcctggaccttgctacagacaacagcgtctgtcaaagcaggcaaacgacaacaacaacagcaactttccctggactgcggctacaaagtatcatctaaatggccgggactcgttggttaatccaggaccagctatggccagccacaaagacgatgaagaaaagtttttccccatgcatggaaccctgatatttggtaaacaaggaacaaatgctaacgacgcggatttggacaatgtcatgattacagatgaagaagaaatccgcaccaccaatcccgtggctacggagcagtacgggactgtgtcaaataatttgcaaaactcaaatactggtccaactactggaactgccaatcaccaaggagcgttacctggtatggtgtggcaggatcgagacgtgtacctgcagggacccatttgggccaagattcctcacaccgatggacactttcatccttctccactgatgggaggttttggactcaaacacccgcctcctcagatcatgatcaaaaacactcccgttccagccaatcctcctacaaacttcagttctgccaagtttgcttccttcatcacacagtattccacgggacaagtcagcgtggagattgagtgggagctgcagaaggagaacagcaaacgctggaaccccgagatccagtacacttccaactacaacaaatctgttaatgtggactttactgtggacactaatggcgtgtattcagagcctcgccccattggcaccagatacctgactcgtaatctgtaa

SEQ ID NO: 2232 - DNA, 2208 bp, Artificial Sequence
  Synthetic Polynucleotide
atggctgccgatggttatcttccagattggctcgaggacactctctctgaaggaataagacagtggtggaagctcaaacctggcccaccaccgccaaagcccgcagagcggcacaaggacgacagtaggggtcttgtgcttcctgggtacaagtacctcggacccttcaacggactcgacaaaggagagccggtcaacgaggcagacgccgcggccctcgagcacgacaaggcctacgaccggcagctcgacagcggagacaacccgtacctcaagtacaaccacgccgacgcggagtttcaggagcgtcttaaagaagatacgtcttttgggggcaacctcggacgagcagtattccaggcgaaaaagagggttcttgaacctctgggcctggttgaggagcctgttaagacggctccgggaaaaaagaggccggtagagcactctcctgtggagccagactcctcctcgggaaccggaaaagcgggccagcagcctgcaagaaaaagattgaattttggtcagactggagacgcaggctccgtacctgacccccagcctctcggacagccaccagcagcccccacaagtttgggatctactacaatggctacaggcagtggcgcaccaatggcagacaataacgagggtgccgatggagtgggtaattcctcaggaaattggcattgcgattcccaatggctgggcgacagagtcatcaccaccagcacccgaacctgggccctgcccacctacaacaaccacctctacaagcaaatctccagccaatcaggagcatcgaacgacaaccactactttggccacagcaccccttgggggtattttgacttcaacagattccactgtcacttctccccacgtgactggcaaagactcatcaacaacaactggggattccgacccaagagactcaacttcaagctctttaacattcaagtcaaagaggtcacgcagaatgacggtacgacgacgattgccaataaccttaccagcacggttcaggtgtttactgactcggagtaccagctcccgtacgtcctcggctcggcgcatcaaggatgcctcccgccgttcccagcagacgtcttcatggtcccacagtatggatacctcaccctgaacaacgggagtcaggcggtaggacgctcttccttttactgcctggagtactttccttctcagatgcttcgtaccggaaacaactttaccttcagctacacctttgaagacgtgcctttccacagtagctacgctcacagccagagtctggatcggctgatgaatcctcttatcgaccagtacctgtattatctaaacaaaacacaatcaaatagtggaactcttcagcagtctcggctactgtttagtcaagctggacccaccagcatgtctcttcaagctaaaaactggctgcctggaccttgctacagacaacagcgtctgtcaaagcaggcaaacgacaacaacaacagcaactttccctggactgcggctacaaagtatcatctaaatggccgggactcgttggttaatccaggaccagctatggccagccacaaagacgatgaagaaaagtttttccccatgcatggaaccctgatatttggtaaacaaggaacaaatgctaacgacgcggatttggacaatgtcatgattacagatgaagaagaaatccgcaccaccaatcccgtggctacggagcagtacgggactgtgtcaaataatttgcaaaactcaaatactggtccaactactggaactgtcaatcaccaaggagcgttacctggtatggtgtggcaggatcgagacgtgtacctgcagggacccatttgggccaagattcctcacaccgatggacactttcatccttctccactgatgggaggttttggactcaaacacccgcctcctcagatcatgatcaaaaacactcccgttccagccaatcctcctacaaacttcagttctgccaagtttgcttccttcatcacacagtattccacgggacaagtcagcgtggagattgagtgggagctgcagaaggagaacagcaaacgctggaaccccgagatccagtacacttccaactacaacaaatctgttaatgtggactttactgtggacactaatggcgtgtattcagagcctcgccccattggcaccagatacctgactcgtaatctgtaa

SEQ ID NO: 2233 - DNA, 2208 bp, Artificial Sequence
  Synthetic Polynucleotide
atggctgccgatggttatcttccagattggctcgaggacactctctctgaaggaataagacagtggtggaagctcaaacctggcccaccaccgccaaagcccgcagagcggcacaaggacgacagtaggggtcttgtgcttcctgggtacaagtacctcggacccttcaacggactcgacaaaggagagccggtcaacgaggcagacgccgcggccctcgagcacgacaaggcctacgaccggcagctcgacagcggagacaacccgtacctcaagtacaaccacgccgacgcggagtttcaggagcgtcttaaagaagatacgtcttttgggggcaacctcggacgagcagtattccaggcgaaaaagagggttcttgaacctctgggcctggttgaggagcctgttaagacggctccgggaaaaaagaggccggtagagcactctcctgtggagccagactcctcctcgggaaccggaaaagcgggccagcagcctgcaagaaaaagattgaattttggtcagactggagacgcagactccgtacctgacccccagcctctcggacagccaccagcagcccccacaagtttgggatctactacaatggctacaggcagtggcgcaccaatggcagacaataacgagggtgccgatggagtgggtaattcctcaggaaattggcattgcgattcccaatggctggacgacagagtcatcaccaccagcacccgaacctgggccctgcccacctacaacaaccacctctacaagcaaatctccagccaatcaggagcatcgaacgacaaccactactttggccacagcaccccttgggggtattttgacttcaacagattccactgtcacttctccccacgtgactggcaaagactcatcaacaacaactggggattccgacccaagagactcaacttcaagctctttaacattcaagtcaaagaggtcacgcagaatgacggtacgacgacgattgccaataaccttaccagcacggttcaggtgtttactgactcggagtaccagctcccgtacgtcctcggctcggcgcatcaaggatgcctcccgccgttcccagcagacgtcttcatggtcccacagtatggatacctcaccctgaacaacgggagtcaggcggtaggacgctcttccttttactgcctggagtactttccttctcagatgcttcgtaccggaaacaactttaccttcagctacacctttgaagacgtgcctttccacagtagctacgctcacagccagagtctggatcggctgatgaatcctcttatcgaccagtacctgtattatctaaacaaaacacaatcaaatagtggaactcttcagcagtctcggctactgtttagtcaagctggacccaccagcatgtctcttcaagctaaaaactggctgcctggaccttgctacagacaacagcgtctgtcaaagcaggcaaacgacaacaacaacagcaactttccctggactgcggctacaaagtatcatctaaatggccgggactcgttggttaatccaggaccagctatggccagccacaaagacgatgaagaaaagtttttccccatgcatggaaccctgatatttggtaaacaaggaacaaatgctaacgacgcggatttggacaatgtcatgattacagatgaagaagaaatccgcaccaccaatcccgtggctacggagcagtacgggactgtgtcaaataatttgcaaaactcaaatactggtccaactactggaactgtcaatcaccaaggagcgttacctggtatggtgtggcaggatcgagacgtgtacctgcagggacccatttgggccaagattcctcacaccgatggacactttcatccttctccactgatgggaggttttggactcaaacacccgcctcctcagatcatgatcaaaaacactcccgttccagccaatcctcctacaaacttcagttctgccaagtttgcttccttcatcacacagtattccacgggacaagtcagcgtggagattgagtgggagctgcagaaggagaacagcaaacgctggaaccccgagatccagtacacttccaactacaacaaatctgttaatgtggactttactgtggacactaatggcgtgtattcagagcctcgccccattggcaccagatacctgactcgtaatctgtaa

SEQ ID NO: 2234 - DNA, 2208 bp, Artificial Sequence
  Synthetic Polynucleotide
atggctgccgatggttatcttccagattggctcgaggacactctctctgaaggaataagacagtggtggaagctcaaacctggcccaccaccgccaaagcccgcagagcggcacaaggacgacagtaggggtcttgtgcttcctgggtacaagtacctcggacccttcaacggactcgacaaaggagagccggtcaacgaggcagacgccgcggccctcgagcacgacaaggcctacgaccggcagctcgacagcggagacaacccgtacctcaagtacaaccacgccgacgcggagtttcaggagcgtcttaaagaagatacgtcttttgggggcaacctcggacgagcagtattccaggcgaaaaagagggttcttgaacctctgggcctggttgaggagcctgttaagacggctccgggaaaaaagaggccggtagagcactctcctgtggagccaggctcctcctcgggaaccggaaaagcgggccagcagcctgcaagaaaaagattgaattttggtcagactggagacgcagactccgtacctgacccccagcctctcggacagccaccagcagcccccacaagtttgggatctactacaatggctacaggcagtggcgcaccaatggcagacaataacgagggtgccgatggagtgggtaattcctcaggaaattggcattgcgattcccaatggctgggcgacagagtcatcaccaccagcacccgaacctgggccctgcccacctacaacaaccacctctacaagcaaatctccagccaatcaggagcatcgaacgacaaccactactttggccacagcaccccttgggggtattttgacttcaacagattccactgtcacttctccccacgtgactggcaaagactcatcaacaacaactggggattccgacccaagagactcaacttcaagctctttaacattcaagtcaaagaggtcacgcagaatgacggtacgacgacgattgccaataaccttaccagcacggttcaggtgtttactgactcggagtaccagctcccgtacgtcctcggctcggcgcatcaaggatgcctcccgccgttcccagcagacgtcttcatggtcccacagtatggatacctcaccctgaacaacgggagtcaggcggtaggacgctcttccttttactgcctggagtactttccttctcagatgcttcgtaccggaaacaactttaccttcagctacacctttgaagacgtgcctttccacagtagctacgctcacagccagagtctggatcggctgatgaatcctcttatcgaccagtacctgtattatctaaacaaaacacaatcaaatagtggaactcttcagcagtctcggctactgtttagtcaagctggacccaccagcatgtctcttcaagctaaaaactggctgcctggaccttgctacagacaacagcgtctgtcaaagcaggcaaacgacaacaacaacagcaactttccctggactgcggctacaaagtatcatctaaatggccgggactcgttggttaatccaggaccagctatggccagccacaaagacgatgaagaaaagtttttccccatgcatggaaccctgatatttggtaaacaaggaacaaatgctaacgacgcggatttggacaatgtcatgattacagatgaagaagaaatccgcaccaccaatcccgtggctacggagcagtacgggactgtgtcaaataatttgcaaaactcaaatactggtccaactactggaactgtcaatcaccaaggagcgttacctggtatggtgtggcaggatcgagacgtgtacctgcagggacccatttgggccaagattcctcacaccgatggacactttcatccttctccactgatgggaggttttggactcaaacacccgcctcctcagatcatgatcaaaaacactcccgttccagccaatcctcctacaaacttcagttctgccaagtttgcttccttcatcacacagtattccacgggacaagtcagcgtggagattgagtgggagctgcagaaggagaacagcaaacgctggaaccccgagatccagtacacttccaactacaacaaatctgttaatgtggactttactgtggacactaatggcgtgtattcagagcctcgccccattggcaccagatacctgactcgtaatctgtaa

SEQ ID NO: 2235 - DNA, 2208 bp, Artificial Sequence
  Synthetic Polynucleotide
atggctgccgatggttatcttccagattggctcgaggacactctctctgaaggaataagacagtggtggaagctcaaacctggcccaccaccgccaaagcccgcagagcggcacaaggacgacagtaggggtcttgtgcttcctgggtacaagtacctcggacccttcaacggactcgacaaaggagagccggtcaacgaggcagacgccgcggccctcgagcacgacaaggcctacgaccggcagctcgacagcggagacaacccgtacctcaagtacaaccacgccgacgcggagtttcaggagcgtcttaaagaagatacgtcttttgggggcaacctcggacgagcagtattccaggcgaaaaagagggttcttgaacctctgggcctggttgaggagcctgttaagacggctccgggaaaaaagaggccggtagagcactctcctgtggagccagactcctcctcgggaaccggaaaagcgggccagcagcctgcaagaaaaagattgaattttggtcagactggagacgcagactccgtacctgacccccagcctctcggacagccaccagcagcccccacaagtttgggatctactacaatggctacaggcagtggcgcaccaatggcagacaataacgagggtgccgatggagtgggtaattcctcaggaaattggcattgcgattcccaatggctgggcgacagagtcatcaccaccagcacccgaacctgggccctgcccacctacaacaaccacctctacaagcaaatctccagccaatcaggagcatcgaacgacaaccactactttggccacagcaccccttgggggtattttgacttcaacagattccactgtcacttctccccacgtgactggcaaagactcatcaacaacaactggggattccgacccaagagactcaacttcaagctctttaacattcaagtcaaagaggtcacgcagaatgacggtacgacgacgattgccaataaccttaccagcacggttcaggtgtttactgactcggagtaccagctcccgtacgtcctcggctcggcgcatcaaggatgcctcccgccgttcccagcagacgtcttcatggtcccacagtatggatacctcaccctgaacaacgggagtcaggcggtaggacgctcttccttttactgcctggagtactttccttctcagatgcttcgtaccggaaacaactttaccttcagctacacctttgaagacgtgcctttccacagtagctacgctcacagccagagtctggatcggctgatgaatcctcttatcgaccagtacctgtattatctaaacaaaacacaatcaaatagtggaactcttcagcagtctcggctactgtttagtcaagctggacccaccagcatgtctcttcaagctaaaaactggctgcctggaccttgctacagacaacagcgtctgtcaaagcaggcaaacgacaacaacaacagcaactttccctggactgcggctacaaagtatcatctaaatggccgggactcgttggttaatccaggaccagctatggccagccacaaagacgatgaagaaaagtttttccccatgcatggaaccctgatatttggtaaacaaggaacaaatgctaacgacgcggatttggacaatgtcatgattacagatgaagaagaaatccgcaccaccaatcccgtggctacggagcagtacgggactgtgtcaaataatttgcaaaactcaaatactggtccaactactggaactgtcaatcaccaaggagcgttacctggtatggtgtggcaggatcgagacgtgtacctgcagggacccatttgggccaagattcctcacaccgatggacactttcatccttctccactgatgggaggttttggactcaaacacccgcctcctcagatcatgatcaaaaacactcccgttccagccaatcctcctacaaacttcagttctgccaagtttgcttccttcatcacacagtattccacgggacaagtcagcgtggagattgggtgggagctgcagaaggagaacagcaaacgctggaaccccgagatccagtacacttccaactacaacaaatctgttaatgtggactttactgtggacactaatggcgtgtattcagagcctcgccccattggcaccagatacctgactcgtaatctgtaa

SEQ ID NO: 2236 - DNA, 2208 bp, Artificial Sequence
  Synthetic Polynucleotide
atggctgccgatggttatcttccagattggctcgaggacactctctctgaaggaataagacagtggtggaagctcaaacctggcccaccaccgccaaagcccgcagagcggcacaaggacgacagtaggggtcttgtgcttcctgggtacaagtacctcggacccttcaacggactcgacaaaggagagccggtcaacgaggcagacgccgcggccctcgagcacgacaaggcctacgaccggcagctcgacagcggagacaacccgtacctcaagtacaaccacgccgacgcggagtttcaggagcgtcttaaagaagatacgtcttttgggggcaacctcggacgagcagtattccaggcgaaaaagagggttcttgaacctctgggcctggttgaggagcctgttaagacggctccgggaaaaaagaggccggtagagcactctcctgtggagccagactcctcctcgggaaccggaaaagcgggccagcagcctgcaagaaaaagattgaattttggtcagactggagacgcagactccgtacctgacccccagcctctcggacagccaccagcagcccccacaagtttgggatctactacaatggctacaggcagtggcgcaccaatggcagacaataacgagggtgccgatggagtgggtaattcctcaggaaattggcattgcgattcccaatggctgggcgacagagtcatcaccaccagcacccgaacctgggccctgcccacctacaacaaccacctctacaagcaaatctccagccaatcaggagcatcgaacgacaaccactactttggccacagcaccccttgggggtattttgacttcaacagattccactgtcacttctccccacgtgactggcaaagactcatcaacaacaactggggattccgacccaagagactcaacttcaagctctttaacattcaagtcaaagaggtcacgcagaatgacggtacgacgacgattgccaataaccttaccagcacggttcaggtgtttactgactcggagtaccagctcccgtacgtcctcggctcggcgcatcaaggatgcctcccgccgttcccagcagacgtcttcatggtcccacagtatggatacctcaccctgaacaacgggagtcaggcggtaggacgctcttccttttactgcctggagtactttccttctcagatgcttcgtaccggaaacaactttaccttcagctacacctttgaagacgtgcctttccacagtagctacgctcacagccagagtctggatcggctgatgaatcctcttatcgaccggtacctgtattatctaaacaaaacacaatcaaatagtggaactcttcagcagtctcggctactgtttagtcaagctggacccaccagcatgtctcttcaagctaaaaactggctgcctggaccttgctacagacaacagcgtctgtcaaagcaggcaaacgacaacaacaacagcaactttccctggactgcggctacaaagtatcatctaaatggccgggactcgttggttaatccaggaccagctatggccagccacaaagacgatgaagaaaagtttttccccatgcatggaaccctgatatttggtaaacaaggaacaaatgctaacgacgcggatttggacaatgtcatgattacagatgaagaagaaatccgcaccaccaatcccgtggctacggagcagtacgggactgtgtcaaataatttgcaaaactcaaatactggtccaactactggaactgtcaatcaccaaggagcgttacctggtatggtgtggcaggatcgagacgtgtacctgcagggacccatttgggccaagattcctcacaccgatggacactttcatccttctccactgatgggaggttttggactcaaacacccgcctcctcagatcatgatcaaaaacactcccgttccagccaatcctcctacaaacttcagttctgccaagtttgcttccttcatcacacagtattccacgggacaagtcagcgtggagattgagtgggagctgcagaaggagaacagcaaacgctggaaccccgagatccagtacacttccaactacaacaaatctgttaatgtggactttactgtggacactaatggcgtgtattcagagcctcgccccattggcaccagatacctgactcgtaatctgtaa

SEQ ID NO: 2237 - DNA, 2208 bp, Artificial Sequence
  Synthetic Polynucleotide
atggctgccgatggttatcttccagattggctcgaggacactctctctgaaggaataagacagtggtggaagctcaaacctggcccaccaccgccaaagcccgcagagcggcacaaggacgacagtaggggtcttgtgcttcctgggtacaagtacctcggacccttcaacggactcgacaaaggagagccggtcaacgaggcagacgccgcggccctcgagcacgacaaggcctacgaccggcagctcgacagcggagacaacccgtacctcaagtacaaccacgccgacgcggagtttcaggagcgtcttaaagaagatacgtcttttgggggcaacctcggacgagcagtattccaggcgaaaaagagggttcttgaacctctgggcctggttgaggagcctgttaagacggctccgggaaaaaagaggccggtagagcactctcctgtggagccagactcctcctcgggaaccggaaaagcgggccagcagcctgcaagaaaaagattgaattttggtcagactggagacgcagactccgtacctgacccccagcctctcggacagccaccagcagcccccacaagtttgggatctactacaatggctacaggcagtggcgcaccaatggcagacaataacgagggtgccgatggagtgggtaattcctcaggaaattggcattgcgattcccaatggctgggcgacagagtcatcaccaccagcacccgaacctgggccctgcccacctacaacaaccacctctacaagcaaatctccagccaatcaggagcatcgaacgacaaccactactttggccacagcaccccttgggggtattttgacttcaacagattccactgtcacttctccccacgtgactggcaaagactcatcaacaacaactggggattccgacccaagagactcaacttcaagctctttaacattcaagtcaaagaggtcacgcagaatgacggtacgacgacgattgccaataaccttaccagcacggttcaggtgtttactgactcggagtaccagctcccgtacgtcctcggctcggcgcatcaaggatgcctcccgccgttcccagcagacgtcttcatggtcccacagtatggatacctcaccctgaacaacgggagtcaggcggtaggacgctcttccttttactgcctggagtactttccttctcagatgcttcgtaccggaaacaactttaccttcagctacacctttgaagacgtgcctttccacagtagctacgctcacagccagagtctggatcggctgatgaatcctcttatcgaccagcacctgtattatctaaacaaaacacaatcaaatagtggaactcttcagcagtctcggctactgtttagtcaagctggacccaccagcatgtctcttcaagctaaaaactggctgcctggaccttgctacagacaacagcgtctgtcaaagcaggcaaacgacaacaacaacagcaactttccctggactgcggctacaaagtatcatctaaatggccgggactcgttggttaatccaggaccagctatggccagccacaaagacgatgaagaaaagtttttccccatgcatggaaccctgatatttggtaaacaaggaacaaatgctaacgacgcggatttggacaatgtcatgattacagatgaagaagaaatccgcaccaccaatcccgtggctacggagcagtacgggactgtgtcaaataatttgcaaaactcaaatactggtccaactactggaactgtcaatcaccaaggagcgttacctggtatggtgtggcaggatcgagacgtgtacctgcagggacccatttgggccaagattcctcacaccgatggacactttcatccttctccactgatgggaggttttggactcaaacacccgcctcctcagatcatgatcaaaaacactcccgttccagccaatcctcctacaaacttcagttctgccaagtttgcttccttcatcacacagtattccacgggacaagtcagcgtggagattgagtgggagctgcagaaggagaacagcaaacgctggaaccccgagatccagtacacttccaactacaacaaatctgttaatgtggactttactgtggacactaatggcgtgtattcagagcctcgccccattggcaccagatacctgactcgtaatctgtaa

SEQ ID NO: 2238 - DNA, 2208 bp, Artificial Sequence
  Synthetic Polynucleotide
atggctgccgatggttatcttccagattggctcgaggacactctctctgaaggaataagacagtggtggaagctcaaacctggcccaccaccgccaaagcccgcagagcggcacaaggacgacagtaggggtcctgtgcttcctgggtacaagtacctcggacccttcaacggactcgacaaaggagagccggtcaacgaggcagacgccgcggccctcgagcacgacaaggcctacgaccggcagctcgacagcggagacaacccgtacctcaagtacaaccacgccgacgcggagtttcaggagcgtcttaaagaagatacgtcttttgggggcaacctcggacgagcagtattccaggcgaaaaagagggttcttgaacctctgggcctggttgaggagcctgttaagacggctccgggaaaaaagaggccggtagagcactctcctgtggagccagactcctcctcgggaaccggaaaagcgggccagcagcctgcaagaaaaagattgaattttggtcagactggagacgcagactccgtacctgacccccagcctctcggacagccaccagcagcccccacaagtttgggatctactacaatggctacaggcagtggcgcaccaatggcagacaataacgagggtgccgatggagtgggtaattcctcaggaaattggcattgcgattcccaatggctgggcgacagagtcatcaccaccagcacccgaacctgggccctgcccacctacaacaaccacctctacaagcaaatctccagccaatcaggagcatcgaacgacaaccactactttggccacagcaccccttgggggtattttgacttcaacagattccactgtcacttctccccacgtgactggcaaagactcatcaacaacaactggggattccgacccaagagactcaacttcaagctctttaacattcaagtcaaagaggtcacgcagaatgacggtacgacgacgattgccaataaccttaccagcacggttcaggtgtttactgactcggagtaccagctcccgtacgtcctcggctcggcgcatcaaggatgcctcccgccgttcccagcagacgtcttcatggtcccacagtatggatacctcaccctgaacaacgggagtcaggcggtaggacgctcttccttttactgcctggagtactttccttctcagatgcttcgtaccggaaacaactttaccttcagctacacctttgaagacgtgcctttccacagtagctacgctcacagccagagtctggatcggctgatgaatcctcttatcgaccagtacctgtattatctaaacaaaacacaatcaaatagtggaactcttcagcagtctcggctactgtttagtcaagctggacccaccagcatgtctcttcaagctaaaaactggctgcctggaccttgctacagacaacagcgtctgtcaaagcaggcaaacgacaacaacaacagcaactttccctggactgcggctacaaagtatcatctaaatggccgggactcgttggttaatccaggaccagctatggccagccacaaagacgatgaagaaaagtttttccccatgcatggaaccctgatatttggtaaacaaggaacaaatgctaacgacgcggatttggacaatgtcatgattacagatgaagaagaaatccgcaccaccaatcccgtggctacggagcagtacgggactgtgtcaaataatttgcaaaactcaaatactggtccaactactggaactgtcaatcaccaaggagcgttacctggtatggtgtggcaggatcgagacgtgtacctgcagggacccatttgggccaagattcctcacaccgatggacactttcatccttctccactgatgggaggttttggactcaaacacccgcctcctcagatcatgatcaaaaacactcccgttccagccaatcctcctacaaacttcagttctgccaagtttgcttccttcatcacacagtattccacgggacaagtcagcgtggagattgagtgggagctgcagaaggagaacagcaaacgctggaaccccgagatccagtacacttccaactacaacaaatctgttaatgtggactttactgtggacactaatggcgtgtattcagagcctcgccccattggcaccagatacctgactcgtaatctgtaa

SEQ ID NO: 2239 - DNA, 2208 bp, Artificial Sequence
  Synthetic Polynucleotide
atggctgccgatggttatcttccagattggctcgaggacactctctctgaaggaataagacagtggtggaagctcaaacctggcccaccaccgccaaagcccgcagagcggcacaaggacgacagtaggggtcttgtgcttcctgggtacaagtacctcggacccttcaacggactcgacaaaggagagccggtcaacgaggcaggcgccgcggccctcgagcacgacaaggcctacgaccggcagctcgacagcggagacaacccgtacctcaagtacaaccacgccgacgcggagtttcaggagcgtcttaaagaagatacgtcttttgggggcaacctcggacgagcagtattccaggcgaaaaagagggttcttgaacctctgggcctggttgaggagcctgttaagacggctccgggaaaaaagaggccggtagagcactctcctgtggagccagactcctcctcgggaaccggaaaagcgggccagcagcctgcaagaaaaagattgaattttggtcagactggagacgcagactccgtacctgacccccagcctctcggacagccaccagcagcccccacaagtttgggatctactacaatggctacaggcagtggcgcaccaatggcagacaataacgagggtgccgatggagtgggtaattcctcaggaaattggcattgcgattcccaatggctgggcgacagagtcatcaccaccagcacccgaacctgggccctgcccacctacaacaaccacctctacaagcaaatctccagccaatcaggagcatcgaacgacaaccactactttggccacagcaccccttgggggtattttgacttcaacagattccactgtcacttctccccacgtgactggcaaagactcatcaacaacaactggggattccgacccaagagactcaacttcaagctctttaacattcaagtcaaagaggtcacgcagaatgacggtacgacgacgattgccaataaccttaccagcacggttcaggtgtttactgactcggagtaccagctcccgtacgtcctcggctcggcgcatcaaggatgcctcccgccgttcccagcagacgtcttcatggtcccacagtatggatacctcaccctgaacaacgggagtcaggcggtaggacgctcttccttttactgcctggagtactttccttctcagatgcttcgtaccggaaacaactttaccttcagctacacctttgaagacgtgcctttccacagtagctacgctcacagccagagtctggatcggctgatgaatcctcttatcgaccagtacctgtattatctaaacaaaacacaatcaaatagtggaactcttcagcagtctcggctactgtttagtcaagctggacccaccagcatgtctcttcaagctaaaaactggctgcctggaccttgctacagacaacagcgtctgtcaaagcaggcaaacgacaacaacaacagcaactttccctggactgcggctacaaagtatcatctaaatggccgggactcgttggttaatccaggaccagctatggccagccacaaagacgatgaagaaaagtttttccccatgcatggaaccctgatatttggtaaacaaggaacaaatgctaacgacgcggatttggacaatgtcatgattacagatgaagaagaaatccgcaccaccaatcccgtggctacggagcagtacgggactgtgtcaaataatttgcaaaactcaaatactggtccaactactggaactgtcaatcaccaaggagcgttacctggtatggtgtggcaggatcgagacgtgtacctgcagggacccatttgggccaagattcctcacaccgatggacactttcatccttctccactgatgggaggttttggactcaaacacccgcctcctcagatcatgatcaaaaacactcccgttccagccaatcctcctacaaacttcagttctgccaagtttgcttccttcatcacacagtattccacgggacaagtcagcgtggagattgagtgggagctgcagaaggagaacagcaaacgctggaaccccgagatccagtacacttccaactacaacaaatctgttaatgtggactttactgtggacactaatggcgtgtattcagagcctcgccccattggcaccagatacctgactcgtaatctgtaa

SEQ ID NO: 2240 - DNA, 2208 bp, Artificial Sequence
  Synthetic Polynucleotide
atggctgccgatggttatcttccagattggctcgaggacactctctctgaaggaataagacagtggtggaagctcaaacctggcccaccaccgccaaagcccgcagagcggcacaaggacgacagtaggggtcttgtgcttcctgggtacaagtacctcggacccttcaacggactcgacaaaggagagccggtcaacggggcagacgccgcggccctcgagcacgacaaggcctacgaccggcagctcgacagcggagacaacccgtacctcaagtacaaccacgccgacgcggagtttcaggagcgtcttaaagaagatacgtcttttgggggcaacctcggacgagcagtattccaggcgaaaaagagggttcttgaacctctgggcctggttgaggagcctgttaagacggctccgggaaaaaagaggccggtagagcactctcctgtggagccagactcctcctcgggaaccggaaaagcgggccagcagcctgcaagaaaaagattgaattttggtcagactggagacgcagactccgtacctgacccccagcctctcggacagccaccagcagcccccacaagtttgggatctactacaatggctacaggcagtggcgcaccaatggcagacaataacgagggtgccgatggagtgggtaattcctcaggaaattggcattgcgattcccaatggctgggcgacagagtcatcaccaccagcacccgaacctgggccctgcccacctacaacaaccacctctacaagcaaatctccagccaatcaggagcatcgaacgacaaccactactttggccacagcaccccttgggggtattttgacttcaacagattccactgtcacttctccccacgtgactggcaaagactcatcaacaacaactggggattccgacccaagagactcaacttcaagctctttaacattcaagtcaaagaggtcacgcagaatgacggtacgacgacgattgccaataaccttaccagcacggttcaggtgtttactgactcggagtaccagctcccgtacgtcctcggctcggcgcatcaaggatgcctcccgccgttcccagcagacgtcttcatggtcccacagtatggatacctcaccctgaacaacgggagtcaggcggtaggacgctcttccttttactgcctggagtactttccttctcagatgcttcgtaccggaaacaactttaccttcagctacacctttgaagacgtgcctttccacagtagctacgctcacagccagagtctggatcggctgatgaatcctcttatcgaccagtacctgtattatctaaacaaaacacaatcaaatagtggaactcttcagcagtctcggctactgtttagtcaagctggacccaccagcatgtctcttcaagctaaaaactggctgcctggaccttgctacagacaacagcgtctgtcaaagcaggcaaacgacaacaacaacagcaactttccctggactgcggctacaaagtatcatctaaatggccgggactcgttggttaatccaggaccagctatggccagccacaaagacgatgaagaaaagtttttccccatgcatggaaccctgatatttggtaaacaaggaacaaatgctaacgacgcggatttggacaatgtcatgattacagatgaagaagaaatccgcaccaccaatcccgtggctacggagcagtacgggactgtgtcaaataatttgcaaaactcaaatactggtccaactactggaactgtcaatcaccaaggagcgttacctggtatggtgtggcaggatcgagacgtgtacctgcagggacccatttgggccaagattcctcacaccgatggacactttcatccttctccactgatgggaggttttggactcaaacacccgcctcctcagatcatgatcaaaaacactcccgttccagccaatcctcctacaaacttcagttctgccaagtttgcttccttcatcacacagtattccacgggacaagtcagcgtggagattgagtgggagctgcagaaggagaacagcaaacgctggaaccccgagatccagtacacttccaactacaacaaatctgttaatgtggactttactgtggacactaatggcgtgtattcagagcctcgccccattggcaccagatacctgactcgtaatctgtaa

SEQ ID NO: 2241 - DNA, 2208 bp, Artificial Sequence
  Synthetic Polynucleotide
atggctgccgatggttatcttccagattggctcgaggacactctctctgaaggaataagacagtggtggaagctcaaacctggcccaccaccgccaaagcccgcagagcggcacaaggacgacagtaggggtcttgtgcttcctgggtacaagtacctcggacccttcaacggactcgacaaaggagagccggtcaacgaggcagacgccgcggccctcgagcacgacaaggcctacgaccggcagctcgacagcggagacaacccgtacctcaagtacaaccacgccgacgcggagtttcaggagcgtcttaaagaagatacgtcttttgggggcaacctcggacgagcagtattccaggcgaaaaagagggttcttgaacctctgggcctggttgaggagcctgttaagacggctccgggaaaaaagaggccggtagagcactctcctgtggagccagactcctcctcgggaaccggaaaagcgggccagcagcctgcaagaaaaagattgaattttggtcagactggagacgcagactccgtacctgacccccagcctctcggacagccaccagcagcccccacaagtttgggatctactacaatggctacaggcagtggcgcaccaatggcagacaataacgagggtgccgatggagtgggtaattcctcaggaaattggcattgcgattcccaatggctgggcgacagagtcatcaccaccagcacccgaacctgggccctgcccacctacaacaaccacctctacaagcaaatctccagccaatcaggagcatcgaacgacaaccactactttggccacagcaccccttgggggtattttgacttcaacagattccactgtcacttctccccacgtgactggcaaagactcatcaacaacaactggggattccgacccaagagactcaacttcaagctctttaacattcaagtcaaagaggtcacgcagaatgacggtacgacgacgattgccaataaccttaccagcacggttcaggtgtttactgactcggagtaccagctcccgtacgtcctcggctcggcgcatcaaggatgcctcccgccgttcccagcagacgtcttcatggtcccacagtatggatacctcaccctgaacaacgggagtcaggcggtaggacgctcttccctttactgcctggagtactttccttctcagatgcttcgtaccggaaacaactttaccttcagctacacctttgaagacgtgcctttccacagtagctacgctcacagccagagtctggatcggctgatgaatcctcttatcgaccagtacctgtattatctaaacaaaacacaatcaaatagtggaactcttcagcagtctcggctactgtttagtcaagctggacccaccagcatgtctcttcaagctaaaaactggctgcctggaccttgctacagacaacagcgtctgtcaaagcaggcaaacgacaacaacaacagcaactttccctggactgcggctacaaagtatcatctaaatggccgggactcgttggttaatccaggaccagctatggccagccacaaagacgatgaagaaaagtttttccccatgcatggaaccctgatatttggtaaacaaggaacaaatgctaacgacgcggatttggacaatgtcatgattacagatgaagaagaaatccgcaccaccaatcccgtggctacggagcagtacgggactgtgtcaaataatttgcaaaactcaaatactggtccaactactggaactgtcaatcaccaaggagcgttacctggtatggtgtggcaggatcgagacgtgtacctgcagggacccatttgggccaagattcctcacaccgatggacactttcatccttctccactgatgggaggttttggactcaaacacccgcctcctcagatcatgatcaaaaacactcccgttccagccaatcctcctacaaacttcagttctgccaagtttgcttccttcatcacacagtattccacgggacaagtcagcgtggagattgagtgggagctgcagaaggagaacagcaaacgctggaaccccgagatccagtacacttccaactacaacaaatctgttaatgtggactttactgtggacactaatggcgtgtattcagagcctcgccccattggcaccagatacctgactcgtaatctgtaa

SEQ ID NO: 2242 - DNA, 2208 bp, Artificial Sequence
  Synthetic Polynucleotide
atggctgccgatggttatcttccagattggctcgaggacactctctctgaaggaataagacagtggtggaagctcaaacctggcccaccaccgccaaagcccgcagagcggcacaaggacgacagtaggggtcttgtgcttcctgggtacaagtacctcggacccttcaacggactcgacaaaggagagccggtcaacgaggcagacgccgcggccctcgagcacgacaaggcctacgaccggcagctcgacagcggagacaacccgtacctcaagtacaaccacgccgacgcggagtttcaggagcgtcttaaagaagatacgtcttttgggggcaacctcggacgagcagtattccaggcgaaaaagagggttcttgaacctctgggcctggttgaggagcctgttaagacggctccgggaaaaaagaggccggtagagcactctcctgtggagccagactcctcctcgggaaccggaaaagcgggccagcagcctgcaagaaaaagattgaattttggtcagactggagacgcagactccgtacctgacccccagcctctcggacagccaccagcagcccccacaagtttgggatctactacaatggctacaggcagtggcgcaccaatggcagacaataacgagggtgccgatggagtgggtaattcctcaggaaattggcattgcgattcccaatggctgggcgacagagtcatcaccaccagcacccgaacctgggccctgcccacctacaacaaccacctctacaagcaaatctccagccaatcaggagcatcgaacgacaaccactactttggccacagcaccccttgggggtattttgacttcaacagattccactgtcacttctccccacgtgactggcaaagactcatcaacaacaactggggattccgacccaagagactcaacttcaagctctttaacattcaagtcaaagaggtcacgcagaatgacggtacgacgacgattgccaataaccttaccagcacggttcaggtgtttactgactcggagtaccagctcccgtacgtcctcggctcggcgcatcaaggatgcctcccgccgttcccagcagacgtcttcatggtcccacagtatggatacctcaccctgaacaacgggagtcaggcggtaggacgctcttccttttactgcctggagtactttccttctcagatgcttcgtaccggaaacaactttacctccagctacacctttgaagacgtgcctttccacagtagctacgctcacagccagagtctggatcggctgatgaatcctcttatcgaccagtacctgtattatctaaacaaaacacaatcaaatagtggaactcttcagcagtctcggctactgtttagtcaagctggacccaccagcatgtctcttcaagctaaaaactggctgcctggaccttgctacagacaacagcgtctgtcaaagcaggcaaacgacaacaacaacagcaactttccctggactgcggctacaaagtatcatctaaatggccgggactcgttggttaatccaggaccagctatggccagccacaaagacgatgaagaaaagtttttccccatgcatggaaccctgatatttggtaaacaaggaacaaatgctaacgacgcggatttggacaatgtcatgattacagatgaagaagaaatccgcaccaccaatcccgtggctacggagcagtacgggactgtgtcaaataatttgcaaaactcaaatactggtccaactactggaactgtcaatcaccaaggagcgttacctggtatggtgtggcaggatcgagacgtgtacctgcagggacccatttgggccaagattcctcacaccgatggacactttcatccttctccactgatgggaggttttggactcaaacacccgcctcctcagatcatgatcaaaaacactcccgttccagccaatcctcctacaaacttcagttctgccaagtttgcttccttcatcacacagtattccacgggacaagtcagcgtggagattgagtgggagctgcagaaggagaacagcaaacgctggaaccccgagatccagtacacttccaactacaacaaatctgttaatgtggactttactgtggacactaatggcgtgtattcagagcctcgccccattggcaccagatacctgactcgtaatctgtaa

SEQ ID NO: 2243 - DNA, 2208 bp, Artificial Sequence
  Synthetic Polynucleotide
atggctgccgatggttatcttccagattggctcgaggacactctctctgaaggaataagacagtggtggaagctcaaacctggcccaccaccgccaaagcccgcagagcggcacaaggacgacagtaggggtcttgtgcttcctgggtacaagtacctcggacccttcaacggactcgacaaaggagagccggtcaacgaggcagacgccgcggccctcgagcacgacaaggcctacgaccggcagctcgacagcggagacaacccgtacctcaagtacaaccacgccgacgcggagtttcaggagcgtcttaaagaagatacgtcttttgggggcaacctcggacgagcagtattccaggcgaaaaagagggttcttgaacctctgggcctggttgaggagcctgttaagacggctccgggaaaaaagaggccggtagagcactctcctgtggagccagactcctcctcgggaaccggaaaagcgggccagcagcctgcaagaaaaagattgaattttggtcagactggagacgcagactccgtacctgacccccagcctctcggacagccaccagcagcccccacaagtttgggatctactacaatggctacaggcagtggcgcaccaatggcagacaataacgagggtgccgatggagtgggtaattcctcaggaaattggcattgcgattcccaatggctgggcgacggagtcatcaccaccagcacccgaacctgggccctgcccacctacaacaaccacctctacaagcaaatctccagccaatcaggagcatcgaacgacaaccactactttggccacagcaccccttgggggtattttgacttcaacagattccactgtcacttctccccacgtgactggcaaagactcatcaacaacaactggggattccgacccaagagactcaacttcaagctctttaacattcaagtcaaagaggtcacgcagaatgacggtacgacgacgattgccaataaccttaccagcacggttcaggtgtttactgactcggagtaccagctcccgtacgtcctcggctcggcgcatcaaggatgcctcccgccgttcccagcagacgtcttcatggtcccacagtatggatacctcaccctgaacaacgggagtcaggcggtaggacgctcttccttttactgcctggagtactttccttctcagatgcttcgtaccggaaacaactttaccttcagctacacctttgaagacgtgcctttccacagtagctacgctcacagccagagtctggatcggctgatgaatcctcttatcgaccagtacctgtattatctaaacaaaacacaatcaaatagtggaactcttcagcagtctcggctactgtttagtcaagctggacccaccagcatgtctcttcaagctaaaaactggctgcctggaccttgctacagacaacagcgtctgtcaaagcaggcaaacgacaacaacaacagcaactttccctggactgcggctacaaagtatcatctaaatggccgggactcgttggttaatccaggaccagctatggccagccacaaagacgatgaagaaaagtttttccccatgcatggaaccctgatatttggtaaacaaggaacaaatgctaacgacgcggatttggacaatgtcatgattacagatgaagaagaaatccgcaccaccaatcccgtggctacggagcagtacgggactgtgtcaaataatttgcaaaactcaaatactggtccaactactggaactgtcaatcaccaaggagcgttacctggtatggtgtggcaggatcgagacgtgtacctgcagggacccatttgggccaagattcctcacaccgatggacactttcatccttctccactgatgggaggttttggactcaaacacccgcctcctcagatcatgatcaaaaacactcccgttccagccaatcctcctacaaacttcagttctgccaagtttgcttccttcatcacacagtattccacgggacaagtcagcgtggagattgagtgggagctgcagaaggagaacagcaaacgctggaaccccgagatccagtacacttccaactacaacaaatctgttaatgtggactttactgtggacactaatggcgtgtattcagagcctcgccccattggcaccagatacctgactcgtaatctgtaa

SEQ ID NO: 2244 - DNA, 2208 bp, Artificial Sequence
  Synthetic Polynucleotide
atggctgccgatggttatcttccagattggctcgaggacactctctctgaaggaataagacagtggtggaagctcaaacctggcccaccaccgccaaagcccgcagagcggcacaaggacgacagtaggggtcttgtgcttcctgggtacaagtacctcggacccttcaacggactcgacaaaggagagccggtcaacgaggcagacgccgcggccctcgagcacgacaaggcctacgaccggcagctcgacagcggagacaacccgtacctcaagtacaaccacgccgacgcggagtttcaggagcgtcttaaagaagatacgtcttttgggggcaacctcggacgagcagtattccaggcgaaaaagagggttcttgaacctctgggcctggttgaggagcctgttaagacggctccgggaaaaaagaggccggtagagcactctcctgtggagccagactcctcctcgggaaccggaaaagcgggccagcagcctgcaagaaaaagattgaattttggtcagactggagacgcagactccgtacctgacccccagcctctcggacagccaccagcagcccccacaagtttgggatctactacaatggctacaggcagtggcgcaccaatggcagacaataacgagggtgccgatggagtgggtaattcctcaggaaattggcattgcgattcccaatggctgggcgacagagtcatcaccaccagcacccgaacctgggccctgcccacctacaacaaccacctctacaagcaaatctccagccaatcaggagcatcgaacgacaaccactactttggccacagcaccccttgggggtattttgacttcaacagattccactgtcacttctccccacgtgactggcaaagactcatcaacaacaactggggattccgacccaagagactcaacttcaagctctttaacattcaagtcaaagaggtcacgcagaatgacggtacgacgacgattgccaataaccttaccagcacggttcaggtgtttactgactcggagtaccagctcccgtacgtcctcggctcggcgcatcaaggatgcctcccgccgttcccagcagacgtcttcatggtcccacagtatggatacctcaccctgaacaacgggagtcaggcggtaggacgctcttccttttactgcctggagtactttccttctcagatgcttcgtaccggaaacaactttaccttcagctacacctttgaagacgtgcctttccacagtagctacgctcacagccagagtctggatcggctgatgaatcctcttatcgaccagtacctgtattatctaaacaaaacacaatcaaatagtggaactcttcagcagtctcggctactgtttagtcaagctggacccaccagcatgtctcttcaagctaaaaactggctgcctggaccttgctacagacaacagcgtctgtcaaagcaggcaaacgacaacaacaacagcaactttccctggactgcggctacaaagtatcatctaaatggccgggactcgttggttaatccaggaccagctatggccagccacaaagacgatgaagaaaagtttttccccatgcatggaaccctgatatttggtaaacaaggaacaaatgctaacgacgcggatttggacaatgtcatgattacagatgaagaagaaatccgcaccaccaatcccgtggctacggagcagtacaggactgtgtcaaataatttgcaaaactcaaatactggtccaactactggaactgtcaatcaccaaggagcgttacctggtatggtgtggcaggatcgagacgtgtacctgcagggacccatttgggccaagattcctcacaccgatggacactttcatccttctccactgatgggaggttttggactcaaacacccgcctcctcagatcatgatcaaaaacactcccgttccagccaatcctcctacaaacttcagttctgccaagtttgcttccttcatcacacagtattccacgggacaagtcagcgtggagattgagtgggagctgcagaaggagaacagcaaacgctggaaccccgagatccagtacacttccaactacaacaaatctgttaatgtggactttactgtggacactaatggcgtgtattcagagcctcgccccattggcaccagatacctgactcgtaatctgtaa

SEQ ID NO: 2245 - DNA, 2208 bp, Artificial Sequence
  Synthetic Polynucleotide
atggctgccgatggttatcttccagattggctcgaggacactctctctgaaggaataagacagtggtggaagctcaaacctggcccaccaccgccaaagcccgcagagcggcacaaggacgacagtaggggtcttgtgcttcctgggtacaagtacctcggacccttcaacggactcgacaaaggagagccggtcaacgaggcagacgccgcggccctcgagcacgacaaggcctacgaccggcagctcgacagcggagacaacccgtacctcaagtacaaccacgccgacgcggagtttcaggagcgtcttaaagaagatacgtcttttgggggcaacctcggacgagcagtattccaggcgaaaaagagggttcttgaacctctgggcctggttgaggagcctgttaagacggctccgggaaaaaagaggccggtagagcactctcctgtggagccagactcctcctcgggaaccggaaaagcgggccagcagcctgcaagaaaaagattgaattttggtcagactggagacgcagactccgtacctgacccccagcctctcggacagccaccagcagcccccacaagtttgggatctactacaatggctacaggcagtggcgcaccaatggcagacaataacgagggtgccgatggagtgggtaattcctcaggaaattggcattgcgattcccaatggctgggcgacagagtcatcaccaccagcacccgaacctgggccctgcccacctacaacaaccacctctacaagcaaatctccagccaatcaggagcatcgaacgacaaccactactttggccacagcaccccttgggggtattttgacttcaacagattccactgtcacttctccccacgtgactggcaaagactcatcaacaacaactggggattccgacccaagagactcaacttcaagctctttaacattcaagtcaaagaggtcacgcagaatgacggtacgacgacgattgccaataaccttaccagcacggttcgggtgtttactgactcggagtaccagctcccgtacgtcctcggctcggcgcatcaaggatgcctcccgccgttcccagcagacgtcttcatggtcccacagtatggatacctcaccctgaacaacgggagtcaggcggtaggacgctcttccttttactgcctggagtactttccttctcagatgcttcgtaccggaaacaactttaccttcagctacacctttgaagacgtgcctttccacagtagctacgctcacagccagagtctggatcggctgatgaatcctcttatcgaccagtacctgtattatctaaacaaaacacaatcaaatagtggaactcttcagcagtctcggctactgtttagtcaagctggacccaccagcatgtctcttcaagctaaaaactggctgcctggaccttgctacagacaacagcgtctgtcaaagcaggcaaacgacaacaacaacagcaactttccctggactgcggctacaaagtatcatctaaatggccgggactcgttggttaatccaggaccagctatggccagccacaaagacgatgaagaaaagtttttccccatgcatggaaccctgatatttggtaaacaaggaacaaatgctaacgacgcggatttggacaatgtcatgattacagatgaagaagaaatccgcaccaccaatcccgtggctacggagcagtacgggactgtgtcaaataatttgcaaaactcaaatactggtccaactactggaactgtcaatcaccaaggagcgttacctggtatggtgtggcaggatcgagacgtgtacctgcagggacccatttgggccaagattcctcacaccgatggacactttcatccttctccactgatgggaggttttggactcaaacacccgcctcctcagatcatgatcaaaaacactcccgttccagccaatcctcctacaaacttcagttctgccaagtttgcttccttcatcacacagtattccacgggacaagtcagcgtggagattgagtgggagctgcagaaggagaacagcaaacgctggaaccccgagatccagtacacttccaactacaacaaatctgttaatgtggactttactgtggacactaatggcgtgtattcagagcctcgccccattggcaccagatacctgactcgtaatctgtaa

SEQ ID NO: 2246 - DNA, 2208 bp, Artificial Sequence
  Synthetic Polynucleotide
atggctgccgatggttatcttccagattggctcgaggacactctctctgaaggaataagacagtggtggaagctcaaacctggcccaccaccgccaaagcccgcagagcggcacaaggacgacagtaggggtcttgtgcttcctgggtacaagtacctcggacccttcaacggactcgacaaaggagagccggtcaacgaggcagacgccgcggccctcgagcacgacaaggcctacgaccggcagctcgacagcggagacaacccgtacctcaagtacaaccacgccgacgcggagtttcaggagcgtcttaaagaagatacgtcttttgggggcaacctcggacgagcagtattccaggcgaaaaagagggttcttgaacctctgggcctggttgaggagcctgttaagacggctccgggaaaaaagaggccggtagagcactctcctgtggagccagactcctcctcgggaaccggaaaagcgggccagcagcctgcaagaaaaagattgaattttggtcagactggagacgcagactccgtacctgacccccagcctctcggacagccaccagcagcccccacaagtttgggatctactacaatggctacaggcagtggcgcaccaatggcagacaataacgagggtgccgatggagtgggtaattcctcaggaaattggcattgcgattcccaatggctgggcgacagagtcatcaccaccagcacccgaacctgggccctgcccacctacaacaaccacctctacaagcaaatctccagccaatcaggagcatcgaacgacaaccactactttggccacagcaccccttgggggtattttgacttcaacagattccactgtcacttctccccacgtgactggcaaagactcatcaacaacaactggggattccgacccaagagactcaacttcaagctctttaacattcaagtcaaagaggtcacgcagaatgacggtacgacgacgattgccaataaccttaccagcacggttcaggtgtttactgactcggagtaccagctcccgtacgtcctcggctcggcgcatcaaggatgcctcccgccgttcccagcagacgtcttcatggtcccacagtatggatacctcaccctgaacaacgggagtcaggcggtaggacgctcttccttttactgcctggagtactttccttctcagatgcttcgtaccggaaacaactttaccttcagctacacctttgaagacgtgcctttccacagtagctacgctcacagccagagtctggatcggctgatgaatcctcttatcgaccagtacctgtattatctaaacaaaacacaatcaaatagtggaactcttcggcagtctcggctactgtttagtcaagctggacccaccagcatgtctcttcaagctaaaaactggctgcctggaccttgctacagacaacagcgtctgtcaaagcaggcaaacgacaacaacaacagcaactttccctggactgcggctacaaagtatcatctaaatggccgggactcgttggttaatccaggaccagctatggccagccacaaagacgatgaagaaaagtttttccccatgcatggaaccctgatatttggtaaacaaggaacaaatgctaacgacgcggatttggacaatgtcatgattacagatgaagaagaaatccgcaccaccaatcccgtggctacggagcagtacgggactgtgtcaaataatttgcaaaactcaaatactggtccaactactggaactgtcaatcaccaaggagcgttacctggtatggtgtggcaggatcgagacgtgtacctgcagggacccatttgggccaagattcctcacaccgatggacactttcatccttctccactgatgggaggttttggactcaaacacccgcctcctcagatcatgatcaaaaacactcccgttccagccaatcctcctacaaacttcagttctgccaagtttgcttccttcatcacacagtattccacgggacaagtcagcgtggagattgagtgggagctgcagaaggagaacagcaaacgctggaaccccgagatccagtacacttccaactacaacaaatctgttaatgtggactttactgtggacactaatggcgtgtattcagagcctcgccccattggcaccagatacctgactcgtaatctgtaa

SEQ ID NO: 2247 - DNA, 2208 bp, Artificial Sequence
  Synthetic Polynucleotide
atggctgccgatggttatcttccagattggctcgaggacactctctctgaaggaataagacagtggtggaagctcaaacctggcccaccaccgccaaagcccgcagagcggcacaaggacgacagtaggggtcttgtgcttcctgggtacaagtacctcggacccttcaacggactcgacaaaggagagccggtcaacgaggcagacgccgcggccctcgagcacgacaaggcctacgaccggcagctcgacagcggagacaacccgtacctcaagtacaaccacgccgacgcggagtttcaggagcgtcttaaagaagatacgtcttttgggggcaacctcggacgagcagtattccaggcgaaaaagagggttcttgaacctctgggcctggttgaggagcctgttaagacggctccgggaaaaaagaggccggtagagcactctcctgtggagccagactcctcctcgggaaccggaaaagcgggccagcagcctgcaagaaaaagattgaattttggtcagactggagacgcagactccgtacctgacccccagcctctcggacagccaccagcagcccccacaagtttgggatctactacaatggctacaggcagtggcgcaccaatggcagacaataacgagggtgccgatggagtgggtaattcctcaggaaattggcattgcgattcccaatggctgggcgacagagtcatcaccaccagcacccgaacctgggccctgcccacctacaacaaccacctctacaagcaaatctccagccaatcaggagcatcgaacgacaaccactactttggccacagcaccccttgggggtattttgacttcaacagattccactgtcacttctccccacgtgactggcaaagactcatcaacaacaactggggattccgacccaagagactcaacttcaagctctttaacattcaagtcaaagaggtcacgcagaatgacggtacgacgacgattgccaataaccttaccagcacggttcaggtgtttactgactcggagtaccagctcccgtacgtcctcggctcggcgcatcaaggatgcctcccgccgttcccagcagacgtcttcatggtcccacagtatggatacctcaccctgaacaacgggagtcaggcggtaggacgctcttccttttactgcctggagtactttccttctcagatgcttcgtaccggaaacaactttaccttcagctacacctttgaagacgtgcctttccacagtagctacgctcacagccagagtctggatcggctgatgaatcctcttatcgaccagtacctgtattatctaaacaaaacacaatcaaatagtggaactcttcagcagtctcggctactgtttagtcaagctggacccaccagcatgtctcttcaagctaaaaactggctgcctggaccttgctacagacaacagcgtctgtcaaagcaggcaaacgacaacaacaacagcaactttccctggactgcggctacaaagtatcatctaaatggccgggactcgttggttaatccaggaccagctatggccagccacaaagacgatgaagaaaagtttttccccatgcatggaaccctgatatttggtaaacaaggaacaaatgctaacgacgcggatttggacaatgtcatgattacagatgaagaagaaatccgcaccaccaatcccgtggctacggagcagtacgggactgtgtcaaataatttgcaaaactcaaatactggtccaactactggaactgtcaatcgccaaggagcgttacctggtatggtgtggcaggatcgagacgtgtacctgcagggacccatttgggccaagattcctcacaccgatggacactttcatccttctccactgatgggaggttttggactcaaacacccgcctcctcagatcatgatcaaaaacactcccgttccagccaatcctcctacaaacttcagttctgccaagtttgcttccttcatcacacagtattccacgggacaagtcagcgtggagattgagtgggagctgcagaaggagaacagcaaacgctggaaccccgagatccagtacacttccaactacaacaaatctgttaatgtggactttactgtggacactaatggcgtgtattcagagcctcgccccattggcaccagatacctgactcgtaatctgtaa

SEQ ID NO: 2248 - DNA, 2208 bp, Artificial Sequence
  Synthetic Polynucleotide
atggctgccgatggttatcttccagattggctcgaggacactctctctgaaggaataagacagtggtggaagctcaaacctggcccaccaccgccaaagcccgcagagcggcacaaggacgacagtaggggtcttgtgcttcctgggtacaagtacctcggacccttcaacggactcgacaaaggagagccggtcaacgaggcagacgccgcggccctcgagcacgacaaggcctacgaccggcagctcgacagcggagacaacccgtacctcaagtacaaccacgccgacgcggagtttcaggagcgtcttaaagaagatacgtcttttgggggcaacctcggacgagcagtattccaggcgaaaaagagggttcttgaacctctgggcctggttgaggagcctgttaagacggctccgggaaaaaagaggccggtagagcactctcctgtggagccagactcctcctcgggaaccggaaaagcgggccagcagcctgcaagaaaaagattgaattttggtcagactggagacgcagactccgtacctgacccccagcctctcggacagccaccagcagcccccacaagtttgggatctactacaatggctacaggcagtggcgcaccaatggcagacaataacgagggtgccgatggagtgggtaattcctcaggaaattggcattgcgattcccaatggctgggcgacagagtcatcaccaccagcacccgaacctgggccctgcccacctacaacaaccacctctacaagcaaatctccagccaatcaggagcatcgaacgacaaccactactttggccacagcaccccttgggggtattttgacttcaacagattccactgtcacttctccccacgtgactggcaaagactcatcaacaacaactggggattccgacccaagagactcaacttcaagctctttaacattcaagtcaaagaggtcacgcagaatgacggtacgacgacgattgccaataaccttaccagcacggttcaggtgtttactgactcggagtaccagctcccgtacgtcctcggctcggcgcatcaaggatgcctcccgccgttcccagcagacgtcttcatggtcccacagtatggatacctcaccctgaacaacgggagtcaggcggtaggacgctcttccttttactgcctggagtactttccttctcagatgcttcgtaccggaaacaactttaccttcagctacacctttgaagacgtgcctttccacagtagctacgctcacagccagagtctggatcggctgatgaatcctcttatcgaccagtacctgtattatctaaacaaaacacaatcaaatagtggaactcttcagcagtctcggctactgtttagtcaagctggacccaccagcatgtctcttcaagctaaaaactggctgcctggaccttgctacagacaacagcgtctgtcaaagcaggcaaacgacaacaacaacggcaactttccctggactgcggctacaaagtatcatctaaatggccgggactcgttggttaatccaggaccagctatggccagccacaaagacgatgaagaaaagtttttccccatgcatggaaccctgatatttggtaaacaaggaacaaatgctaacgacgcggatttggacaatgtcatgattacagatgaagaagaaatccgcaccaccaatcccgtggctacggagcagtacgggactgtgtcaaataatttgcaaaactcaaatactggtccaactactggaactgtcaatcaccaaggagcgttacctggtatggtgtggcaggatcgagacgtgtacctgcagggacccatttgggccaagattcctcacaccgatggacactttcatccttctccactgatgggaggttttggactcaaacacccgcctcctcagatcatgatcaaaaacactcccgttccagccaatcctcctacaaacttcagttctgccaagtttgcttccttcatcacacagtattccacgggacaagtcagcgtggagattgagtgggagctgcagaaggagaacagcaaacgctggaaccccgagatccagtacacttccaactacaacaaatctgttaatgtggactttactgtggacactaatggcgtgtattcagagcctcgccccattggcaccagatacctgactcgtaatctgtaa

SEQ ID NO: 2249 - DNA, 2208 bp, Artificial Sequence
  Synthetic Polynucleotide
atggctgccgatggttatcttccagattggctcgaggacactctctctgaaggaataagacagtggtggaagctcaaacctggcccaccaccgccaaagcccgcagagcggcacaaggacgacagtaggggtcttgtgcttcctgggtacaagtacctcggacccttcaacggactcgacaaaggagagccggtcaacgaggcagacgccgcggccctcgagcacgacaaggcctacgaccggcagctcgacagcggagacaacccgtacctcaagtacaaccacgccgacgcggagtttcaggagcgtcttaaagaagatacgtcttttgggggcaacctcggacgagcagtattccaggcgaaaaagagggttcttgaacctctgggcctggttgaggagcctgttaagacggctccgggaaaaaagaggccggtagagcactctcctgtggagccagactcctcctcgggaaccggaaaagcgggccagcagcctgcaagaaaaagattgaattttggtcagactggagacgcagactccgtacctgacccccagcctctcggacagccaccagcagcccccacaagtttgggatctactacaatggctacaggcagtggcgcaccaatggcagacaataacgagggtgccgatggagtgggtaattcctcaggaaattggcattgcgattcccaatggctgggcgacagagtcatcaccaccagcacccgaacctgggccctgcccacctacaacaaccacctctacaagcaaatctccagccaatcaggagcatcgaacgacaaccactactttggccacagcaccccttgggggtattttgacttcaacagattccactgtcacttctccccacgtgactggcaaagactcatcaacaacaactggggattccgacccaagagactcaacttcaagctctttaacattcaagtcaaagaggtcacgcagaatgacggtacgacgacgattgccaataaccttaccagcacggttcaggtgtttactgactcggagtaccagctcccgtacgtcctcggctcggcgcatcaaggatgcctcccgccgttcccagcagacgtcttcatggtcccacagtatggatacctcaccctgaacaacgggagtcaggcggtaggacgctcttccttttactgcctggagtactttccttctcagatgcttcgtaccggaaacaactttaccttcagctacacctttgaagacgtgcctttccacagtagctacgctcacagccagagtctggatcggctgatgaatcctcttatcgaccagtacctgtattatctaaacaaaacacaatcaaatagtggaactcttcagcagtctcggctactgtttagtcaagctggacccaccagcatgtctcttcaagctaaaaactggctgcctggaccttgctacagacaacagcgtctgtcaaagcaggcaaacgacaacaacaacagcaactttccctggactgcggctacaaagtatcatctaaatggccgggactcgttggttaatccaggaccagctatggccagccacaaagacgatgaagaaaagtttttccccatgcatggaaccctgatatttggtaaacaaggaacaaatgctaacgacgcggatttggacaatgtcatgattacagatgaagaagaaatccgcaccaccaatcccgtggctacggagcagtacgggactgtgtcaaataatttgcaaaactcaaatactggtccaactactggaactgtcaatcaccaaggagcgttacctggtatggtgtggcaggatcgagacgtgtacctgcagggacccatttgggccaagattcctcacaccgatggacactttcatccttctccactgatgggaggttttggactcaaacacccgcctcctcagatcatgatcaaaaacactcccgttccagccaatcctcctacaaacttcagttctgccaagtttgcttccttcatcacacagtattccacgggacaagtcagcgtggagattgagtgggagctgcagaaggagaacggcaaacgctggaaccccgagatccagtacacttccaactacaacaaatctgttaatgtggactttactgtggacactaatggcgtgtattcagagcctcgccccattggcaccagatacctgactcgtaatctgtaa

SEQ ID NO: 2250 - DNA, 2208 bp, Artificial Sequence
  Synthetic Polynucleotide
atggctgccgatggttatcttccagattggctcgaggacgctctctctgaaggaataagacagtggtggaagctcaaacctggcccaccaccgccaaagcccgcagagcggcacaaggacgacagtaggggtcttgtgcttcctgggtacaagtacctcggacccttcaacggactcgacaaaggagagccggtcaacgaggcagacgccgcggccctcgagcacgacaaggcctacgaccggcagctcgacagcggagacaacccgtacctcaagtacaaccacgccgacgcggagtttcaggagcgtcttaaagaagatacgtcttttgggggcaacctcggacgagcagtattccaggcgaaaaagagggttcttgaacctctgggcctggttgaggagcctgttaagacggctccgggaaaaaagaggccggtagagcactctcctgtggagccagactcctcctcgggaaccggaaaagcgggccagcagcctgcaagaaaaagattgaattttggtcagactggagacgcagactccgtacctgacccccagcctctcggacagccaccagcagcccccacaagtttgggatctactacaatggctacaggcagtggcgcaccaatggcagacaataacgagggtgccgatggagtgggtaattcctcaggaaattggcattgcgattcccaatggctgggcgacagagtcatcaccaccagcacccgaacctgggccctgcccacctacaacaaccacctctacaagcaaatctccagccaatcaggagcatcgaacgacaaccactactttggccacagcaccccttgggggtattttgacttcaacagattccactgtcacttctccccacgtgactggcaaagactcatcaacaacaactggggattccgacccaagagactcaacttcaagctctttaacattcaagtcaaagaggtcacgcagaatgacggtacgacgacgattgccaataaccttaccagcacggttcaggtgtttactgactcggagtaccagctcccgtacgtcctcggctcggcgcatcaaggatgcctcccgccgttcccagcagacgtcttcatggtcccacagtatggatacctcaccctgaacaacgggagtcaggcggtaggacgctcttccttttactgcctggagtactttccttctcagatgcttcgtaccggaaacaactttaccttcagctacacctttgaagacgtgcctttccacagtagctacgctcacagccagagtctggatcggctgatgaatcctcttatcgaccagtacctgtattatctaaacaaaacacaatcaaatagtggaactcttcagcagtctcggctactgtttagtcaagctggacccaccagcatgtctcttcaagctaaaaactggctgcctggaccttgctacagacaacagcgtctgtcaaagcaggcaaacgacaacaacaacagcaactttccctggactgcggctacaaagtatcatctaaatggccgggactcgttggttaatccaggaccagctatggccagccacaaagacgatgaagaaaagtttttccccatgcatggaaccctgatatttggtaaacaaggaacaaatgctaacgacgcggatttggacaatgtcatgattacagatgaagaagaaatccgcaccaccaatcccgtggctacggagcagtacgggactgtgtcaaataatttgcaaaactcaaatactggtccaactactggaactgtcaatcaccaaggagcgttacctggtatggtgtggcaggatcgagacgtgtacctgcagggacccatttgggccaagattcctcacaccgatggacactttcatccttctccactgatgggaggttttggactcaaacacccgcctcctcagatcatgatcaaaaacactcccgttccagccaatcctcctacaaacttcagttctgccaagtttgcttccttcatcacacagtattccacgggacaagtcagcgtggagattgagtgggagctgcagaaggagaacagcaaacgctggaaccccgagatccagtacacttccaactacaacaaatctgttaatgtggactttactgtggacactaatggcgtgtattcagagcctcgccccattggcaccagatacctgactcgtaatctgtaa

SEQ ID NO: 2251 - DNA, 2208 bp, Artificial Sequence
  Synthetic Polynucleotide
atggctgccgatggttatcttccagattggctcgaggacactctctctgaaggaataagacagtggtggaagctcaaacctggcccaccaccgccaaagcccgcagagcggcacaaggacgacagtaggggtcttgtgcttcctgggtacaagtacctcggacccttcaacggactcgacaaaggagagccggtcaacgaggcagacgccgcggccctcgagcacgacaaggcctacgaccggcagctcgacagcggagacaacccgtacctcaagtacaaccacgccgacgcggagtttcaggagcgtcttaaagaagatacgccttttgggggcaacctcggacgagcagtattccaggcgaaaaagagggttcttgaacctctgggcctggttgaggagcctgttaagacggctccgggaaaaaagaggccggtagagcactctcctgtggagccagactcctcctcgggaaccggaaaagcgggccagcagcctgcaagaaaaagattgaattttggtcagactggagacgcagactccgtacctgacccccagcctctcggacagccaccagcagcccccacaagtttgggatctactacaatggctacaggcagtggcgcaccaatggcagacaataacgagggtgccgatggagtgggtaattcctcaggaaattggcattgcgattcccaatggctgggcgacagagtcatcaccaccagcacccgaacctgggccctgcccacctacaacaaccacctctacaagcaaatctccagccaatcaggagcatcgaacgacaaccactactttggccacagcaccccttgggggtattttgacttcaacagattccactgtcacttctccccacgtgactggcaaagactcatcaacaacaactggggattccgacccaagagactcaacttcaagctctttaacattcaagtcaaagaggtcacgcagaatgacggtacgacgacgattgccaataaccttaccagcacggttcaggtgtttactgactcggagtaccagctcccgtacgtcctcggctcggcgcatcaaggatgcctcccgccgttcccagcagacgtcttcatggtcccacagtatggatacctcaccctgaacaacgggagtcaggcggtaggacgctcttccttttactgcctggagtactttccttctcagatgcttcgtaccggaaacaactttaccttcagctacacctttgaagacgtgcctttccacagtagctacgctcacagccagagtctggatcggctgatgaatcctcttatcgaccagtacctgtattatctaaacaaaacacaatcaaatagtggaactcttcagcagtctcggctactgtttagtcaagctggacccaccagcatgtctcttcaagctaaaaactggctgcctggaccttgctacagacaacagcgtctgtcaaagcaggcaaacgacaacaacaacagcaactttccctggactgcggctacaaagtatcatctaaatggccgggactcgttggttaatccaggaccagctatggccagccacaaagacgatgaagaaaagtttttccccatgcatggaaccctgatatttggtaaacaaggaacaaatgctaacgacgcggatttggacaatgtcatgattacagatgaagaagaaatccgcaccaccaatcccgtggctacggagcagtacgggactgtgtcaaataatttgcaaaactcaaatactggtccaactactggaactgtcaatcaccaaggagcgttacctggtatggtgtggcaggatcgagacgtgtacctgcagggacccatttgggccaagattcctcacaccgatggacactttcatccttctccactgatgggaggttttggactcaaacacccgcctcctcagatcatgatcaaaaacactcccgttccagccaatcctcctacaaacttcagttctgccaagtttgcttccttcatcacacagtattccacgggacaagtcagcgtggagattgagtgggagctgcagaaggagaacagcaaacgctggaaccccgagatccagtacacttccaactacaacaaatctgttaatgtggactttactgtggacactaatggcgtgtattcagagcctcgccccattggcaccagatacctgactcgtaatctgtaa

SEQ ID NO: 2252 - DNA, 25 bp, Artificial Sequence
  Synthetic
gactgcatctttgaacaataaatga

SEQ ID NO: 2253 - DNA, 28 bp, Artificial Sequence
  Synthetic
gaaacgaattaaccggtttattgattaa

SEQ ID NO: 2254 - DNA, 41 bp, Artificial Sequence
  Synthetic
catcactacgctagatgactgcatctttgaacaataaatga

SEQ ID NO: 2255 - DNA, 44 bp, Artificial Sequence
  Synthetic
tagtatatcgagactcgaaacgaattaaccggtttattgattaa

SEQ ID NO: 2256 - DNA, 23 bp, Artificial Sequence
  Synthetic
agagcggcataaggacgacagca

SEQ ID NO: 2257 - DNA, 23 bp, Artificial Sequence
  Synthetic
gcattctcctgtggagccagact

SEQ ID NO: 2258 - DNA, 23 bp, Artificial Sequence
  Synthetic
ttacttgagcagaacaaacgctc

SEQ ID NO: 2259 - DNA, 24 bp, Artificial Sequence
  Synthetic
caaaacaaacactccaagcggaac

SEQ ID NO: 2260 - DNA, 23 bp, Artificial Sequence
  Synthetic
aaccaccacgcagtccaggcttc

SEQ ID NO: 2261 - DNA, 32 bp, Artificial Sequence
  Synthetic
atcaaaaacatctgcggataacaacaacagtg

SEQ ID NO: 2262 - DNA, 24 bp, Artificial Sequence
  Synthetic
caacaacagtgaatattcgtggac

SEQ ID NO: 2263 - DNA, 32 bp, Artificial Sequence
  Synthetic
tgaagaaaaattttttcctcagagcggggttc

SEQ ID NO: 2264 - DNA, 23 bp, Artificial Sequence
  Synthetic
tggaaaacaaggctcgggaaaaa

SEQ ID NO: 2265 - DNA, 25 bp, Artificial Sequence
  Synthetic
acaagactcggagaaaactaatgtg

SEQ ID NO: 2266 - DNA, 23 bp, Artificial Sequence
  Synthetic
caacctccagagaggcaacacac

SEQ ID NO: 2267 - DNA, 23 bp, Artificial Sequence
  Synthetic
gagcggcaacagacaggcagcca

SEQ ID NO: 2268 - DNA, 23 bp, Artificial Sequence
  Synthetic
ggcagccaccgcagatgtcaaca

SEQ ID NO: 2269 - DNA, 18 bp, Artificial Sequence
  Synthetic
gcgggctttggtggtggt

SEQ ID NO: 2270 - DNA, 20 bp, Artificial Sequence
  Synthetic
tctaccggcctcttttttcc

SEQ ID NO: 2271 - DNA, 18 bp, Artificial Sequence
  Synthetic
tacagatactggtcgatc

SEQ ID NO: 2272 - DNA, 21 bp, Artificial Sequence
  Synthetic
ctcaagtaatacagatactgg

SEQ ID NO: 2273 - DNA, 18 bp, Artificial Sequence
  Synthetic
ccgcttggagcgtttgtt

SEQ ID NO: 2274 - DNA, 18 bp, Artificial Sequence
  Synthetic
actcgctgctggcggtaa

SEQ ID NO: 2275 - DNA, 19 bp, Artificial Sequence
  Synthetic
ttatccgcagctgtttttg

SEQ ID NO: 2276 - DNA, 18 bp, Artificial Sequence
  Synthetic
tcgtccttgtggctggcc

SEQ ID NO: 2277 - DNA, 18 bp, Artificial Sequence
  Synthetic
aagatgagaaccccgctc

SEQ ID NO: 2278 - DNA, 18 bp, Artificial Sequence
  Synthetic
tttccaaagatgagaacc

SEQ ID NO: 2279 - DNA, 23 bp, Artificial Sequence
  Synthetic
gtagatacagaaccatactgctc

SEQ ID NO: 2280 - DNA, 29 bp, Artificial Sequence
  Synthetic
tggaggttggtagatacagaaccatactg

SEQ ID NO: 2281 - DNA, 18 bp, Artificial Sequence
  Synthetic
tgtgtgttgccgctctgg
